United States Patent Application Publication US 2018/0305408 A1 - sequence listing, part 7

SEQ ID NO: 118015 - protein, 27 aa, Artificial Sequence
  Cyclic GFR-binding peptide
EPISILYLVGRTPKVKFKYEDENEKVV

SEQ ID NO: 118016 - protein, 27 aa, Artificial Sequence
  Cyclic GFR-binding peptide
SPISMLYKDEYDKVVLKYHYDENEKVV

SEQ ID NO: 118017 - protein, 27 aa, Artificial Sequence
  Cyclic GFR-binding peptide
EPISVLYLDDMGVPTKFKYEDENEKVV

SEQ ID NO: 118018 - protein, 27 aa, Artificial Sequence
  Cyclic GFR-binding peptide
NAISMLYFDEYDKVVLKKYRDENEKVV

SEQ ID NO: 118019 - protein, 27 aa, Artificial Sequence
  Cyclic GFR-binding peptide
SATSILYYVGRKPKVLRKHRDENEKVV

SEQ ID NO: 118020 - protein, 27 aa, Artificial Sequence
  Cyclic GFR-binding peptide
SPISILYKVGRKPKVLKYHYDENEKVV

SEQ ID NO: 118021 - protein, 27 aa, Artificial Sequence
  Cyclic GFR-binding peptide
EPISILYLIGKTPKIKFKYEDENEKVV

SEQ ID NO: 118022 - protein, 27 aa, Artificial Sequence
  Cyclic GFR-binding peptide
EPISILYLDENKNVVKFKYEDENEKVV

SEQ ID NO: 118023 - protein, 27 aa, Artificial Sequence
  Cyclic GFR-binding peptide
SPINILYFVGRTPKVYGKIPDENEKVV

SEQ ID NO: 118024 - protein, 27 aa, Artificial Sequence
  Cyclic GFR-binding peptide
SPINMLYFDENEKVVYGKIPDENEKVV

SEQ ID NO: 118025 - protein, 27 aa, Artificial Sequence
  Cyclic GFR-binding peptide
SPISILYKDKGVVTYLKYHYDENEKVV

SEQ ID NO: 118026 - protein, 27 aa, Artificial Sequence
  Cyclic GFR-binding peptide
EPISMLYLDNGRVLLKFKYEDENEKVV

SEQ ID NO: 118027 - protein, 27 aa, Artificial Sequence
  Cyclic GFR-binding peptide
NAISILYFVGRKPKVLKKYRDENEKVV

SEQ ID NO: 118028 - protein, 27 aa, Artificial Sequence
  Cyclic GFR-binding peptide
SPINVLYFDDMGVPTYGKIPDENEKVV

SEQ ID NO: 118029 - protein, 27 aa, Artificial Sequence
  Cyclic GFR-binding peptide
SPISILYKDENKNVVLKYHYDENEKVV

SEQ ID NO: 118030 - protein, 27 aa, Artificial Sequence
  Cyclic GFR-binding peptide
SPISVLYKDDSSNVILKYHYDENEKVV

SEQ ID NO: 118031 - protein, 27 aa, Artificial Sequence
  Cyclic GFR-binding peptide
SPINVLYFDDSSNVIYGKIPDENEKVV

SEQ ID NO: 118032 - protein, 27 aa, Artificial Sequence
  Cyclic GFR-binding peptide
NAISILYFDKGVVTYLKKYRDENEKVV

SEQ ID NO: 118033 - protein, 27 aa, Artificial Sequence
  Cyclic GFR-binding peptide
SATSMLYYDNGRVLLLRKHRDENEKVV

SEQ ID NO: 118034 - protein, 27 aa, Artificial Sequence
  Cyclic GFR-binding peptide
SPISMLYKDNGRVLLLKYHYDENEKVV

SEQ ID NO: 118035 - protein, 27 aa, Artificial Sequence
  Cyclic GFR-binding peptide
NAISVLYFDDSSNVILKKYRDENEKVV

SEQ ID NO: 118036 - protein, 27 aa, Artificial Sequence
  Cyclic GFR-binding peptide
SATSILYYDENKNVVLRKHRDENEKVV

SEQ ID NO: 118037 - protein, 27 aa, Artificial Sequence
  Cyclic GFR-binding peptide
SATSILYYIGKTPKILRKHRDENEKVV

SEQ ID NO: 118038 - protein, 27 aa, Artificial Sequence
  Cyclic GFR-binding peptide
SPINILYFDKGVVTYYGKIPDENEKVV

SEQ ID NO: 118039 - protein, 27 aa, Artificial Sequence
  Cyclic GFR-binding peptide
SPISVLYKDDMGVPTLKYHYDENEKVV

SEQ ID NO: 118040 - protein, 27 aa, Artificial Sequence
  Cyclic GFR-binding peptide
SATSVLYYDSSNNVILRKHRDENEKVV

SEQ ID NO: 118041 - protein, 27 aa, Artificial Sequence
  Cyclic GFR-binding peptide
NAISMLYFDNGRVLLLKKYRDENEKVV

SEQ ID NO: 118042 - protein, 27 aa, Artificial Sequence
  Cyclic GFR-binding peptide
SPISILYKVGRTPKVLKYHYDENEKVV

SEQ ID NO: 118043 - protein, 27 aa, Artificial Sequence
  Cyclic GFR-binding peptide
SATSVLYYDDSSNVILRKHRDENEKVV

SEQ ID NO: 118044 - protein, 27 aa, Artificial Sequence
  Cyclic GFR-binding peptide
SPINMLYFDNGRVLLYGKIPDENEKVV

SEQ ID NO: 118045 - protein, 27 aa, Artificial Sequence
  Cyclic GFR-binding peptide
NAISILYFDENKNVVLKKYRDENEKVV

SEQ ID NO: 118046 - protein, 27 aa, Artificial Sequence
  Cyclic GFR-binding peptide
EPISMLYLDEYDKVVKFKYEDENEKVV

SEQ ID NO: 118047 - protein, 27 aa, Artificial Sequence
  Cyclic GFR-binding peptide
SPINILYFDENKNVVYGKIPDENEKVV

SEQ ID NO: 118048 - protein, 27 aa, Artificial Sequence
  Cyclic GFR-binding peptide
SPINILYFIGKTPKIYGKIPDENEKVV

SEQ ID NO: 118049 - protein, 27 aa, Artificial Sequence
  Cyclic GFR-binding peptide
EPISILYLDAANNVVKFKYEDENEKVV

SEQ ID NO: 118050 - protein, 27 aa, Artificial Sequence
  Cyclic GFR-binding peptide
SATSILYYDKGVVTYLRKHRDENEKVV

SEQ ID NO: 118051 - protein, 27 aa, Artificial Sequence
  Cyclic GFR-binding peptide
NAISILYFIGKTPKILKKYRDENEKVV

SEQ ID NO: 118052 - protein, 27 aa, Artificial Sequence
  Cyclic GFR-binding peptide
SPINMLYFDEYDKVVYGKIPDENEKVV

SEQ ID NO: 118053 - protein, 27 aa, Artificial Sequence
  Cyclic GFR-binding peptide
EPISILYLDSANNVVKFKYEDENEKVV

SEQ ID NO: 118054 - protein, 27 aa, Artificial Sequence
  Cyclic GFR-binding peptide
NAISILYFVGRTPKVLKKYRDENEKVV

SEQ ID NO: 118055 - protein, 27 aa, Artificial Sequence
  Cyclic GFR-binding peptide
SATSMLYYDENEKVVLRKHRDENEKVV

SEQ ID NO: 118056 - protein, 27 aa, Artificial Sequence
  Cyclic GFR-binding peptide
SPISILYKIGKTPKILKYHYDENEKVV

SEQ ID NO: 118057 - protein, 27 aa, Artificial Sequence
  Cyclic GFR-binding peptide
SPISMLYKDENEKVVLKYHYDENEKVV

SEQ ID NO: 118058 - protein, 27 aa, Artificial Sequence
  Cyclic GFR-binding peptide
SATSMLYYNDKQQIILRKHRDENEKVV

SEQ ID NO: 118059 - protein, 27 aa, Artificial Sequence
  Cyclic GFR-binding peptide
NAISMLYFDENEKVVLKKYRDENEKVV

SEQ ID NO: 118060 - protein, 27 aa, Artificial Sequence
  Cyclic GFR-binding peptide
NAISILYFDAANNVVLKKYRDENEKVV

SEQ ID NO: 118061 - protein, 27 aa, Artificial Sequence
  Cyclic GFR-binding peptide
EPISMLYLNDKQQIIKFKYEDENEKVV

SEQ ID NO: 118062 - protein, 27 aa, Artificial Sequence
  Cyclic GFR-binding peptide
NAISVLYFDDMGVPTLKKYRDENEKVV

SEQ ID NO: 118063 - protein, 27 aa, Artificial Sequence
  Cyclic GFR-binding peptide
SPISILYKDAANNVVLKYHYDENEKVV

SEQ ID NO: 118064 - protein, 27 aa, Artificial Sequence
  Cyclic GFR-binding peptide
SPINVLYFDSSNNVIYGKIPDENEKVV

SEQ ID NO: 118065 - protein, 27 aa, Artificial Sequence
  Cyclic GFR-binding peptide
SPINILYFVGRKPKVYGKIPDENEKVV

SEQ ID NO: 118066 - protein, 27 aa, Artificial Sequence
  Cyclic GFR-binding peptide
NAISMLYFNDKQQIILKKYRDENEKVV

SEQ ID NO: 118067 - protein, 27 aa, Artificial Sequence
  Cyclic GFR-binding peptide
SPINMLYFNDKQQIIYGKIPDENEKVV

SEQ ID NO: 118068 - protein, 27 aa, Artificial Sequence
  Cyclic GFR-binding peptide
NAISVLYFDSSNNVILKKYRDENEKVV

SEQ ID NO: 118069 - protein, 27 aa, Artificial Sequence
  Cyclic GFR-binding peptide
SPINILYFDAANNVVYGKIPDENEKVV

SEQ ID NO: 118070 - protein, 27 aa, Artificial Sequence
  Cyclic GFR-binding peptide
SATSILYYVGRTPKVLRKHRDENEKVV

SEQ ID NO: 118071 - protein, 27 aa, Artificial Sequence
  Cyclic GFR-binding peptide
EPISVLYLDSSNNVIKFKYEDENEKVV

SEQ ID NO: 118072 - protein, 27 aa, Artificial Sequence
  Cyclic GFR-binding peptide
SATSILYYDSANNVVLRKHRDENEKVV

SEQ ID NO: 118073 - protein, 27 aa, Artificial Sequence
  Cyclic GFR-binding peptide
SATSVLYYDDMGVPTLRKHRDENEKVV

SEQ ID NO: 118074 - protein, 27 aa, Artificial Sequence
  Cyclic GFR-binding peptide
SPISVLYKDSSNNVILKYHYDENEKVV

SEQ ID NO: 118075 - protein, 27 aa, Artificial Sequence
  Cyclic GFR-binding peptide
SPISILYKDSANNVVLKYHYDENEKVV

SEQ ID NO: 118076 - protein, 27 aa, Artificial Sequence
  Cyclic GFR-binding peptide
EPISVLYLDDSSNVIKFKYEDENEKVV

SEQ ID NO: 118077 - protein, 27 aa, Artificial Sequence
  Cyclic GFR-binding peptide
EPISILYLVGRKPKVKFKYEDENEKVV

SEQ ID NO: 118078 - protein, 27 aa, Artificial Sequence
  Cyclic GFR-binding peptide
SATSMLYYDEYDKVVLRKHRDENEKVV

SEQ ID NO: 118079 - protein, 27 aa, Artificial Sequence
  Cyclic GFR-binding peptide
EPISMLYLDENEKVVKFKYEDENEKVV

SEQ ID NO: 118080 - protein, 27 aa, Artificial Sequence
  Cyclic GFR-binding peptide
EPISILYLDKGVVTYKFKYEDENEKVV

SEQ ID NO: 118081 - protein, 27 aa, Artificial Sequence
  Cyclic GFR-binding peptide
SPINILYFDSANNVVYGKIPDENEKVV

SEQ ID NO: 118082 - protein, 27 aa, Artificial Sequence
  Cyclic GFR-binding peptide
SPISMLYKNDKQQIILKYHYDENEKVV

SEQ ID NO: 118083 - protein, 27 aa, Artificial Sequence
  Cyclic GFR-binding peptide
NAISILYFDSANNVVLKKYRDENEKVV

SEQ ID NO: 118084 - protein, 27 aa, Artificial Sequence
  Cyclic GFR-binding peptide
SATSILYYDAANNVVLRKHRDENEKVV

SEQ ID NO: 118085 - protein, 27 aa, Artificial Sequence
  Cyclic GFR-binding peptide
DENEKVVSMEGIIIQQKDNMIQMTINS

SEQ ID NO: 118086 - protein, 27 aa, Artificial Sequence
  Cyclic GFR-binding peptide
DENEKVVSMEGIIVNSSDDMIQVTINS

SEQ ID NO: 118087 - protein, 27 aa, Artificial Sequence
  Cyclic GFR-binding peptide
DENEKVVSMEGLVKPKRGVMIQITINS

SEQ ID NO: 118088 - protein, 27 aa, Artificial Sequence
  Cyclic GFR-binding peptide
DENEKVVSMEGLVVNNASDMIQITINS

SEQ ID NO: 118089 - protein, 29 aa, Artificial Sequence
  Cyclic GFR-binding peptide
DENEKVVSMEGIFIPKKRVIEMIQVTINS

SEQ ID NO: 118090 - protein, 27 aa, Artificial Sequence
  Cyclic GFR-binding peptide
DENEKVVSMEGILLVRGNDMIQMTINS

SEQ ID NO: 118091 - protein, 29 aa, Artificial Sequence
  Cyclic GFR-binding peptide
DENEKVVSMEGILKPKKRVYEMIQVTINS

SEQ ID NO: 118092 - protein, 27 aa, Artificial Sequence
  Cyclic GFR-binding peptide
DENEKVVSMEGLIKPTKGIMIQITINS

SEQ ID NO: 118093 - protein, 27 aa, Artificial Sequence
  Cyclic GFR-binding peptide
DENEKVVSMEGLIVNSSDDMIQVTINS

SEQ ID NO: 118094 - protein, 29 aa, Artificial Sequence
  Cyclic GFR-binding peptide
DENEKVVSMEGIHQGQHPKIRMIQMTINS

SEQ ID NO: 118095 - protein, 27 aa, Artificial Sequence
  Cyclic GFR-binding peptide
DENEKVVSMEGIVVNNASDMIQITINS

SEQ ID NO: 118096 - protein, 29 aa, Artificial Sequence
  Cyclic GFR-binding peptide
DENEKVVSMEGLLKPKKRVYEMIQVTINS

SEQ ID NO: 118097 - protein, 27 aa, Artificial Sequence
  Cyclic GFR-binding peptide
DENEKVVSMEGIVKPKRGVMIQITINS

SEQ ID NO: 118098 - protein, 27 aa, Artificial Sequence
  Cyclic GFR-binding peptide
DENEKVVSMEGIVKPTRGVMIQITINS

SEQ ID NO: 118099 - protein, 27 aa, Artificial Sequence
  Cyclic GFR-binding peptide
DENEKVVSMEGLVVNNAADMIQITINS

SEQ ID NO: 118100 - protein, 27 aa, Artificial Sequence
  Cyclic GFR-binding peptide
DENEKVVSMEGLLLVRGNDMIQMTINS

SEQ ID NO: 118101 - protein, 27 aa, Artificial Sequence
  Cyclic GFR-binding peptide
DENEKVVSMEGIIKPTKGIMIQITINS

SEQ ID NO: 118102 - protein, 27 aa, Artificial Sequence
  Cyclic GFR-binding peptide
DENEKVVSMEGLIIQQKDNMIQMTINS

SEQ ID NO: 118103 - protein, 29 aa, Artificial Sequence
  Cyclic GFR-binding peptide
DENEKVVSMEGLHQGQHPKIRMIQMTINS

SEQ ID NO: 118104 - protein, 27 aa, Artificial Sequence
  Cyclic GFR-binding peptide
DENEKVVSMEGIVVNNAADMIQITINS

SEQ ID NO: 118105 - protein, 29 aa, Artificial Sequence
  Cyclic GFR-binding peptide
DENEKVVSMEGLFIPKKRVIEMIQVTINS

SEQ ID NO: 118106 - protein, 27 aa, Artificial Sequence
  Cyclic GFR-binding peptide
DENEKVVSMEGLVKPTRGVMIQITINS

SEQ ID NO: 118107 - protein, 27 aa, Artificial Sequence
  Cyclic GFR-binding peptide
SNITMQIMNDKQQIIIGEMSDENEKVV

SEQ ID NO: 118108 - protein, 27 aa, Artificial Sequence
  Cyclic GFR-binding peptide
SNITVQIMDDSSNVIIGEMSDENEKVV

SEQ ID NO: 118109 - protein, 27 aa, Artificial Sequence
  Cyclic GFR-binding peptide
SNITIQIMVGRKPKVLGEMSDENEKVV

SEQ ID NO: 118110 - protein, 27 aa, Artificial Sequence
  Cyclic GFR-binding peptide
SNITIQIMDSANNVVLGEMSDENEKVV

SEQ ID NO: 118111 - protein, 29 aa, Artificial Sequence
  Cyclic GFR-binding peptide
SNITVQIMEIVRKKPIFIGEMSDENEKVV

SEQ ID NO: 118112 - protein, 27 aa, Artificial Sequence
  Cyclic GFR-binding peptide
SNITMQIMDNGRVLLIGEMSDENEKVV

SEQ ID NO: 118113 - protein, 29 aa, Artificial Sequence
  Cyclic GFR-binding peptide
SNITVQIMEYVRKKPKLIGEMSDENEKVV

SEQ ID NO: 118114 - protein, 27 aa, Artificial Sequence
  Cyclic GFR-binding peptide
SNITIQIMIGKTPKILGEMSDENEKVV

SEQ ID NO: 118115 - protein, 27 aa, Artificial Sequence
  Cyclic GFR-binding peptide
SNITVQIMDDSSNVILGEMSDENEKVV

SEQ ID NO: 118116 - protein, 29 aa, Artificial Sequence
  Cyclic GFR-binding peptide
SNITMQIMRIKPHQGQHIGEMSDENEKVV

SEQ ID NO: 118117 - protein, 27 aa, Artificial Sequence
  Cyclic GFR-binding peptide
SNITIQIMDSANNVVIGEMSDENEKVV

SEQ ID NO: 118118 - protein, 29 aa, Artificial Sequence
  Cyclic GFR-binding peptide
SNITVQIMEYVRKKPKLLGEMSDENEKVV

SEQ ID NO: 118119 - protein, 27 aa, Artificial Sequence
  Cyclic GFR-binding peptide
SNITIQIMVGRKPKVIGEMSDENEKVV

SEQ ID NO: 118120 - protein, 27 aa, Artificial Sequence
  Cyclic GFR-binding peptide
SNITIQIMVGRTPKVIGEMSDENEKVV

SEQ ID NO: 118121 - protein, 27 aa, Artificial Sequence
  Cyclic GFR-binding peptide
SNITIQIMDAANNVVLGEMSDENEKVV

SEQ ID NO: 118122 - protein, 27 aa, Artificial Sequence
  Cyclic GFR-binding peptide
SNITMQIMDNGRVLLLGEMSDENEKVV

SEQ ID NO: 118123 - protein, 27 aa, Artificial Sequence
  Cyclic GFR-binding peptide
SNITIQIMIGKTPKIIGEMSDENEKVV

SEQ ID NO: 118124 - protein, 27 aa, Artificial Sequence
  Cyclic GFR-binding peptide
SNITMQIMNDKQQIILGEMSDENEKVV

SEQ ID NO: 118125 - protein, 29 aa, Artificial Sequence
  Cyclic GFR-binding peptide
SNITMQIMRIKPHQGQHLGEMSDENEKVV

SEQ ID NO: 118126 - protein, 27 aa, Artificial Sequence
  Cyclic GFR-binding peptide
SNITIQIMDAANNVVIGEMSDENEKVV

SEQ ID NO: 118127 - protein, 29 aa, Artificial Sequence
  Cyclic GFR-binding peptide
SNITVQIMEIVRKKPIFLGEMSDENEKVV

SEQ ID NO: 118128 - protein, 27 aa, Artificial Sequence
  Cyclic GFR-binding peptide
SNITIQIMVGRTPKVLGEMSDENEKVV

SEQ ID NO: 118129 - protein, 27 aa, Artificial Sequence
  Cyclic GFR-binding peptide
DENEKVVRYKKLIKPTKGIFYLISIAN

SEQ ID NO: 118130 - protein, 27 aa, Artificial Sequence
  Cyclic GFR-binding peptide
DENEKVVQYNKLVVNKNEDLYLISIAS

SEQ ID NO: 118131 - protein, 27 aa, Artificial Sequence
  Cyclic GFR-binding peptide
DENEKVVQYNKLVVNNAADLYLISIAS

SEQ ID NO: 118132 - protein, 27 aa, Artificial Sequence
  Cyclic GFR-binding peptide
DENEKVVQYNKLIVNNSSDLYLVSIAS

SEQ ID NO: 118133 - protein, 27 aa, Artificial Sequence
  Cyclic GFR-binding peptide
DENEKVVRYKKLVVKDYEDFYLMSIAN

SEQ ID NO: 118134 - protein, 27 aa, Artificial Sequence
  Cyclic GFR-binding peptide
DENEKVVRYKKLVKPTRGVFYLISIAN

SEQ ID NO: 118135 - protein, 27 aa, Artificial Sequence
  Cyclic GFR-binding peptide
DENEKVVQYNKLIIQQKDNLYLMSIAS

SEQ ID NO: 118136 - protein, 27 aa, Artificial Sequence
  Cyclic GFR-binding peptide
DENEKVVQYNKLLLVRGNDLYLMSIAS

SEQ ID NO: 118137 - protein, 27 aa, Artificial Sequence
  Cyclic GFR-binding peptide
DENEKVVQYNKLVKPTRGVLYLISIAS

SEQ ID NO: 118138 - protein, 27 aa, Artificial Sequence
  Cyclic GFR-binding peptide
DENEKVVRYKKLVVKENEDFYLMSIAN

SEQ ID NO: 118139 - protein, 27 aa, Artificial Sequence
  Cyclic GFR-binding peptide
DENEKVVRYKKLVVNNAADFYLISIAN

SEQ ID NO: 118140 - protein, 27 aa, Artificial Sequence
  Cyclic GFR-binding peptide
DENEKVVQYNKLTPVGMDDLYLVSIAS

SEQ ID NO: 118141 - protein, 27 aa, Artificial Sequence
  Cyclic GFR-binding peptide
DENEKVVRYKKLTPVGMDDFYLVSIAN

SEQ ID NO: 118142 - protein, 27 aa, Artificial Sequence
  Cyclic GFR-binding peptide
DENEKVVRYKKLVKPKRGVFYLISIAN

SEQ ID NO: 118143 - protein, 27 aa, Artificial Sequence
  Cyclic GFR-binding peptide
DENEKVVQYNKLVVKENEDLYLMSIAS

SEQ ID NO: 118144 - protein, 27 aa, Artificial Sequence
  Cyclic GFR-binding peptide
DENEKVVRYKKLIIQQKDNFYLMSIAN

SEQ ID NO: 118145 - protein, 27 aa, Artificial Sequence
  Cyclic GFR-binding peptide
DENEKVVQYNKLVKPKRGVLYLISIAS

SEQ ID NO: 118146 - protein, 27 aa, Artificial Sequence
  Cyclic GFR-binding peptide
DENEKVVRYKKLIVNNSSDFYLVSIAN

SEQ ID NO: 118147 - protein, 27 aa, Artificial Sequence
  Cyclic GFR-binding peptide
DENEKVVRYKKLYTVVGKDFYLISIAN

SEQ ID NO: 118148 - protein, 27 aa, Artificial Sequence
  Cyclic GFR-binding peptide
DENEKVVRYKKLIVNSSDDFYLVSIAN

SEQ ID NO: 118149 - protein, 27 aa, Artificial Sequence
  Cyclic GFR-binding peptide
DENEKVVRYKKLLLVRGNDFYLMSIAN

SEQ ID NO: 118150 - protein, 27 aa, Artificial Sequence
  Cyclic GFR-binding peptide
DENEKVVQYNKLVVNNASDLYLISIAS

SEQ ID NO: 118151 - protein, 27 aa, Artificial Sequence
  Cyclic GFR-binding peptide
DENEKVVQYNKLIKPTKGILYLISIAS

SEQ ID NO: 118152 - protein, 27 aa, Artificial Sequence
  Cyclic GFR-binding peptide
DENEKVVRYKKLVVNKNEDFYLISIAN

SEQ ID NO: 118153 - protein, 27 aa, Artificial Sequence
  Cyclic GFR-binding peptide
DENEKVVQYNKLYTVVGKDLYLISIAS

SEQ ID NO: 118154 - protein, 27 aa, Artificial Sequence
  Cyclic GFR-binding peptide
DENEKVVQYNKLVVKDYEDLYLMSIAS

SEQ ID NO: 118155 - protein, 27 aa, Artificial Sequence
  Cyclic GFR-binding peptide
DENEKVVRYKKLVVNNASDFYLISIAN

SEQ ID NO: 118156 - protein, 27 aa, Artificial Sequence
  Cyclic GFR-binding peptide
DENEKVVQYNKLIVNSSDDLYLVSIAS

SEQ ID NO: 118157 - protein, 27 aa, Artificial Sequence
  Cyclic GFR-binding peptide
NAISILYFIGKTPKILKKYRDENEKVV

SEQ ID NO: 118158 - protein, 27 aa, Artificial Sequence
  Cyclic GFR-binding peptide
SAISILYLDENKNVVLKNYQDENEKVV

SEQ ID NO: 118159 - protein, 27 aa, Artificial Sequence
  Cyclic GFR-binding peptide
SAISILYLDAANNVVLKNYQDENEKVV

SEQ ID NO: 118160 - protein, 27 aa, Artificial Sequence
  Cyclic GFR-binding peptide
SAISVLYLDSSNNVILKNYQDENEKVV

SEQ ID NO: 118161 - protein, 27 aa, Artificial Sequence
  Cyclic GFR-binding peptide
NAISMLYFDEYDKVVLKKYRDENEKVV

SEQ ID NO: 118162 - protein, 27 aa, Artificial Sequence
  Cyclic GFR-binding peptide
NAISILYFVGRTPKVLKKYRDENEKVV

SEQ ID NO: 118163 - protein, 27 aa, Artificial Sequence
  Cyclic GFR-binding peptide
SAISMLYLNDKQQIILKNYQDENEKVV

SEQ ID NO: 118164 - protein, 27 aa, Artificial Sequence
  Cyclic GFR-binding peptide
SAISMLYLDNGRVLLLKNYQDENEKVV

SEQ ID NO: 118165 - protein, 27 aa, Artificial Sequence
  Cyclic GFR-binding peptide
SAISILYLVGRTPKVLKNYQDENEKVV

SEQ ID NO: 118166 - protein, 27 aa, Artificial Sequence
  Cyclic GFR-binding peptide
NAISMLYFDENEKVVLKKYRDENEKVV

SEQ ID NO: 118167 - protein, 27 aa, Artificial Sequence
  Cyclic GFR-binding peptide
NAISILYFDAANNVVLKKYRDENEKVV

SEQ ID NO: 118168 - protein, 27 aa, Artificial Sequence
  Cyclic GFR-binding peptide
SAISVLYLDDMGVPTLKNYQDENEKVV

SEQ ID NO: 118169 - protein, 27 aa, Artificial Sequence
  Cyclic GFR-binding peptide
NAISVLYFDDMGVPTLKKYRDENEKVV

SEQ ID NO: 118170 - protein, 27 aa, Artificial Sequence
  Cyclic GFR-binding peptide
NAISILYFVGRKPKVLKKYRDENEKVV

SEQ ID NO: 118171 - protein, 27 aa, Artificial Sequence
  Cyclic GFR-binding peptide
SAISMLYLDENEKVVLKNYQDENEKVV

SEQ ID NO: 118172 - protein, 27 aa, Artificial Sequence
  Cyclic GFR-binding peptide
NAISMLYFNDKQQIILKKYRDENEKVV

SEQ ID NO: 118173 - protein, 27 aa, Artificial Sequence
  Cyclic GFR-binding peptide
SAISILYLVGRKPKVLKNYQDENEKVV

SEQ ID NO: 118174 - protein, 27 aa, Artificial Sequence
  Cyclic GFR-binding peptide
NAISVLYFDSSNNVILKKYRDENEKVV

SEQ ID NO: 118175 - protein, 27 aa, Artificial Sequence
  Cyclic GFR-binding peptide
NAISILYFDKGVVTYLKKYRDENEKVV

SEQ ID NO: 118176 - protein, 27 aa, Artificial Sequence
  Cyclic GFR-binding peptide
NAISVLYFDDSSNVILKKYRDENEKVV

SEQ ID NO: 118177 - protein, 27 aa, Artificial Sequence
  Cyclic GFR-binding peptide
NAISMLYFDNGRVLLLKKYRDENEKVV

SEQ ID NO: 118178 - protein, 27 aa, Artificial Sequence
  Cyclic GFR-binding peptide
SAISILYLDSANNVVLKNYQDENEKVV

SEQ ID NO: 118179 - protein, 27 aa, Artificial Sequence
  Cyclic GFR-binding peptide
SAISILYLIGKTPKILKNYQDENEKVV

SEQ ID NO: 118180 - protein, 27 aa, Artificial Sequence
  Cyclic GFR-binding peptide
NAISILYFDENKNVVLKKYRDENEKVV

SEQ ID NO: 118181 - protein, 27 aa, Artificial Sequence
  Cyclic GFR-binding peptide
SAISILYLDKGVVTYLKNYQDENEKVV

SEQ ID NO: 118182 - protein, 27 aa, Artificial Sequence
  Cyclic GFR-binding peptide
SAISMLYLDEYDKVVLKNYQDENEKVV

SEQ ID NO: 118183 - protein, 27 aa, Artificial Sequence
  Cyclic GFR-binding peptide
NAISILYFDSANNVVLKKYRDENEKVV

SEQ ID NO: 118184 - protein, 27 aa, Artificial Sequence
  Cyclic GFR-binding peptide
SAISVLYLDDSSNVILKNYQDENEKVV

SEQ ID NO: 118185 - protein, 29 aa, Artificial Sequence
  Cyclic GFR-binding peptide
DENEKVVVTAKKLKPKKRVYEIKRVQVPR

SEQ ID NO: 118186 - protein, 29 aa, Artificial Sequence
  Cyclic GFR-binding peptide
DENEKVVVQVEKLKPKKRVYEVKAVKVSR

SEQ ID NO: 118187 - protein, 27 aa, Artificial Sequence
  Cyclic GFR-binding peptide
DENEKVVVTAKKVKPTRGVIKRIQVPR

SEQ ID NO: 118188 - protein, 29 aa, Artificial Sequence
  Cyclic GFR-binding peptide
DENEKVVVQVEKFIPKKRVIEVKAVKVSR

SEQ ID NO: 118189 - protein, 29 aa, Artificial Sequence
  Cyclic GFR-binding peptide
DENEKVVVQVEKHQGQHPKIRVKAMKVSR

SEQ ID NO: 118190 - protein, 29 aa, Artificial Sequence
  Cyclic GFR-binding peptide
DENEKVVVTAKKHQGQHPKIRIKRMQVPR

SEQ ID NO: 118191 - protein, 27 aa, Artificial Sequence
  Cyclic GFR-binding peptide
DENEKVVVTAKKIKPTKGIIKRIQVPR

SEQ ID NO: 118192 - protein, 27 aa, Artificial Sequence
  Cyclic GFR-binding peptide
DENEKVVVQVEKVKPKRGVVKAIKVSR

SEQ ID NO: 118193 - protein, 27 aa, Artificial Sequence
  Cyclic GFR-binding peptide
DENEKVVVTAKKVKPKRGVIKRIQVPR

SEQ ID NO: 118194 - protein, 27 aa, Artificial Sequence
  Cyclic GFR-binding peptide
DENEKVVVQVEKIKPTKGIVKAIKVSR

SEQ ID NO: 118195 - protein, 27 aa, Artificial Sequence
  Cyclic GFR-binding peptide
DENEKVVVQVEKVKPTRGVVKAIKVSR

SEQ ID NO: 118196 - protein, 29 aa, Artificial Sequence
  Cyclic GFR-binding peptide
DENEKVVVTAKKFIPKKRVIEIKRVQVPR

SEQ ID NO: 118197 - protein, 29 aa, Artificial Sequence
  Cyclic GFR-binding peptide
RPVQVRKIEYVRKKPKLKKATVDENEKVV

SEQ ID NO: 118198 - protein, 29 aa, Artificial Sequence
  Cyclic GFR-binding peptide
RSVKVAKVEYVRKKPKLKEVQVDENEKVV

SEQ ID NO: 118199 - protein, 27 aa, Artificial Sequence
  Cyclic GFR-binding peptide
RPVQIRKIVGRTPKVKKATVDENEKVV

SEQ ID NO: 118200 - protein, 29 aa, Artificial Sequence
  Cyclic GFR-binding peptide
RSVKVAKVEIVRKKPIFKEVQVDENEKVV

SEQ ID NO: 118201 - protein, 29 aa, Artificial Sequence
  Cyclic GFR-binding peptide
RSVKMAKVRIKPHQGQHKEVQVDENEKVV

SEQ ID NO: 118202 - protein, 29 aa, Artificial Sequence
  Cyclic GFR-binding peptide
RPVQMRKIRIKPHQGQHKKATVDENEKVV

SEQ ID NO: 118203 - protein, 27 aa, Artificial Sequence
  Cyclic GFR-binding peptide
RPVQIRKIIGKTPKIKKATVDENEKVV

SEQ ID NO: 118204 - protein, 27 aa, Artificial Sequence
  Cyclic GFR-binding peptide
RSVKIAKVVGRKPKVKEVQVDENEKVV

SEQ ID NO: 118205 - protein, 27 aa, Artificial Sequence
  Cyclic GFR-binding peptide
RPVQIRKIVGRKPKVKKATVDENEKVV

SEQ ID NO: 118206 - protein, 27 aa, Artificial Sequence
  Cyclic GFR-binding peptide
RSVKIAKVIGKTPKIKEVQVDENEKVV

SEQ ID NO: 118207 - protein, 27 aa, Artificial Sequence
  Cyclic GFR-binding peptide
RSVKIAKVVGRTPKVKEVQVDENEKVV

SEQ ID NO: 118208 - protein, 29 aa, Artificial Sequence
  Cyclic GFR-binding peptide
RPVQVRKIEIVRKKPIFKKATVDENEKVV

SEQ ID NO: 118209 - protein, 27 aa, Artificial Sequence
  Cyclic GFR-binding peptide
DENKNVVRYKKLIKPTKGIFYLISIAN

SEQ ID NO: 118210 - protein, 29 aa, Artificial Sequence
  Cyclic GFR-binding peptide
DENKNVVRHKRLFIPKKRVIEYYLVSTAS

SEQ ID NO: 118211 - protein, 27 aa, Artificial Sequence
  Cyclic GFR-binding peptide
DENKNVVYHYKLVVKDYEDKYLMSIPS

SEQ ID NO: 118212 - protein, 27 aa, Artificial Sequence
  Cyclic GFR-binding peptide
DENKNVVQYNKLIVNNSSDLYLVSIAS

SEQ ID NO: 118213 - protein, 27 aa, Artificial Sequence
  Cyclic GFR-binding peptide
DENKNVVRYKKLVVKDYEDFYLMSIAN

SEQ ID NO: 118214 - protein, 27 aa, Artificial Sequence
  Cyclic GFR-binding peptide
DENKNVVRYKKLVKPTRGVFYLISIAN

SEQ ID NO: 118215 - protein, 27 aa, Artificial Sequence
  Cyclic GFR-binding peptide
DENKNVVRHKRLVVKENEDYYLMSTAS

SEQ ID NO: 118216 - protein, 27 aa, Artificial Sequence
  Cyclic GFR-binding peptide
DENKNVVYHYKLIKPTKGIKYLISIPS

SEQ ID NO: 118217 - protein, 29 aa, Artificial Sequence
  Cyclic GFR-binding peptide
DENKNVVRYKKLFIPKKRVIEFYLVSIAN

SEQ ID NO: 118218 - protein, 27 aa, Artificial Sequence
  Cyclic GFR-binding peptide
DENKNVVYHYKLVVKENEDKYLMSIPS

SEQ ID NO: 118219 - protein, 27 aa, Artificial Sequence
  Cyclic GFR-binding peptide
DENKNVVRHKRLVKPKRGVYYLISTAS

SEQ ID NO: 118220 - protein, 27 aa, Artificial Sequence
  Cyclic GFR-binding peptide
DENKNVVYHYKLVKPKRGVKYLISIPS

SEQ ID NO: 118221 - protein, 29 aa, Artificial Sequence
  Cyclic GFR-binding peptide
DENKNVVQYNKLFIPKKRVIELYLVSIAS

SEQ ID NO: 118222 - protein, 27 aa, Artificial Sequence
  Cyclic GFR-binding peptide
DENKNVVQYNKLVKPTRGVLYLISIAS

SEQ ID NO: 118223 - protein, 27 aa, Artificial Sequence
  Cyclic GFR-binding peptide
DENKNVVRYKKLVVKENEDFYLMSIAN

SEQ ID NO: 118224 - protein, 27 aa, Artificial Sequence
  Cyclic GFR-binding peptide
DENKNVVQYNKLTPVGMDDLYLVSIAS

SEQ ID NO: 118225 - protein, 27 aa, Artificial Sequence
  Cyclic GFR-binding peptide
DENKNVVRYKKLTPVGMDDFYLVSIAN

SEQ ID NO: 118226 - protein, 27 aa, Artificial Sequence
  Cyclic GFR-binding peptide
DENKNVVRYKKLVKPKRGVFYLISIAN

SEQ ID NO: 118227 - protein, 27 aa, Artificial Sequence
  Cyclic GFR-binding peptide
DENKNVVQYNKLVVKENEDLYLMSIAS

SEQ ID NO: 118228 - protein, 27 aa, Artificial Sequence
  Cyclic GFR-binding peptide
DENKNVVYHYKLIVNSSDDKYLVSIPS

SEQ ID NO: 118229 - protein, 27 aa, Artificial Sequence
  Cyclic GFR-binding peptide
DENKNVVQYNKLVKPKRGVLYLISIAS

SEQ ID NO: 118230 - protein, 27 aa, Artificial Sequence
  Cyclic GFR-binding peptide
DENKNVVRYKKLIVNNSSDFYLVSIAN

SEQ ID NO: 118231 - protein, 27 aa, Artificial Sequence
  Cyclic GFR-binding peptide
DENKNVVRYKKLIVNSSDDFYLVSIAN

SEQ ID NO: 118232 - protein, 27 aa, Artificial Sequence
  Cyclic GFR-binding peptide
DENKNVVRHKRLVKPTRGVYYLISTAS

SEQ ID NO: 118233 - protein, 29 aa, Artificial Sequence
  Cyclic GFR-binding peptide
DENKNVVYHYKLFIPKKRVIEKYLVSIPS

SEQ ID NO: 118234 - protein, 27 aa, Artificial Sequence
  Cyclic GFR-binding peptide
DENKNVVRHKRLIKPTKGIYYLISTAS

SEQ ID NO: 118235 - protein, 27 aa, Artificial Sequence
  Cyclic GFR-binding peptide
DENKNVVRHKRLTPVGMDDYYLVSTAS

SEQ ID NO: 118236 - protein, 27 aa, Artificial Sequence
  Cyclic GFR-binding peptide
DENKNVVYHYKLTPVGMDDKYLVSIPS

SEQ ID NO: 118237 - protein, 27 aa, Artificial Sequence
  Cyclic GFR-binding peptide
DENKNVVYHYKLIVNNSSDKYLVSIPS

SEQ ID NO: 118238 - protein, 27 aa, Artificial Sequence
  Cyclic GFR-binding peptide
DENKNVVRHKRLIVNNSSDYYLVSTAS

SEQ ID NO: 118239 - protein, 27 aa, Artificial Sequence
  Cyclic GFR-binding peptide
DENKNVVYHYKLVKPTRGVKYLISIPS

SEQ ID NO: 118240 - protein, 27 aa, Artificial Sequence
  Cyclic GFR-binding peptide
DENKNVVRHKRLIVNSSDDYYLVSTAS

SEQ ID NO: 118241 - protein, 27 aa, Artificial Sequence
  Cyclic GFR-binding peptide
DENKNVVRHKRLVVKDYEDYYLMSTAS

SEQ ID NO: 118242 - protein, 27 aa, Artificial Sequence
  Cyclic GFR-binding peptide
DENKNVVQYNKLIKPTKGILYLISIAS

SEQ ID NO: 118243 - protein, 27 aa, Artificial Sequence
  Cyclic GFR-binding peptide
DENKNVVQYNKLVVKDYEDLYLMSIAS

SEQ ID NO: 118244 - protein, 27 aa, Artificial Sequence
  Cyclic GFR-binding peptide
DENKNVVQYNKLIVNSSDDLYLVSIAS

SEQ ID NO: 118245 - protein, 27 aa, Artificial Sequence
  Cyclic GFR-binding peptide
NAISILYFIGKTPKILKKYRDENKNVV

SEQ ID NO: 118246 - protein, 29 aa, Artificial Sequence
  Cyclic GFR-binding peptide
SATSVLYYEIVRKKPIFLRKHRDENKNVV

SEQ ID NO: 118247 - protein, 27 aa, Artificial Sequence
  Cyclic GFR-binding peptide
SPISMLYKDEYDKVVLKYHYDENKNVV

SEQ ID NO: 118248 - protein, 27 aa, Artificial Sequence
  Cyclic GFR-binding peptide
SAISVLYLDSSNNVILKNYQDENKNVV

SEQ ID NO: 118249 - protein, 27 aa, Artificial Sequence
  Cyclic GFR-binding peptide
NAISMLYFDEYDKVVLKKYRDENKNVV

SEQ ID NO: 118250 - protein, 27 aa, Artificial Sequence
  Cyclic GFR-binding peptide
NAISILYFVGRTPKVLKKYRDENKNVV

SEQ ID NO: 118251 - protein, 27 aa, Artificial Sequence
  Cyclic GFR-binding peptide
SATSMLYYDENEKVVLRKHRDENKNVV

SEQ ID NO: 118252 - protein, 27 aa, Artificial Sequence
  Cyclic GFR-binding peptide
SPISILYKIGKTPKILKYHYDENKNVV

SEQ ID NO: 118253 - protein, 29 aa, Artificial Sequence
  Cyclic GFR-binding peptide
NAISVLYFEIVRKKPIFLKKYRDENKNVV

SEQ ID NO: 118254 - protein, 27 aa, Artificial Sequence
  Cyclic GFR-binding peptide
SPISMLYKDENEKVVLKYHYDENKNVV

SEQ ID NO: 118255 - protein, 27 aa, Artificial Sequence
  Cyclic GFR-binding peptide
SATSILYYVGRKPKVLRKHRDENKNVV

SEQ ID NO: 118256 - protein, 27 aa, Artificial Sequence
  Cyclic GFR-binding peptide
SPISILYKVGRKPKVLKYHYDENKNVV

SEQ ID NO: 118257 - protein, 29 aa, Artificial Sequence
  Cyclic GFR-binding peptide
SAISVLYLEIVRKKPIFLKNYQDENKNVV

SEQ ID NO: 118258 - protein, 27 aa, Artificial Sequence
  Cyclic GFR-binding peptide
SAISILYLVGRTPKVLKNYQDENKNVV

SEQ ID NO: 118259 - protein, 27 aa, Artificial Sequence
  Cyclic GFR-binding peptide
NAISMLYFDENEKVVLKKYRDENKNVV

SEQ ID NO: 118260 - protein, 27 aa, Artificial Sequence
  Cyclic GFR-binding peptide
SAISVLYLDDMGVPTLKNYQDENKNVV

SEQ ID NO: 118261 - protein, 27 aa, Artificial Sequence
  Cyclic GFR-binding peptide
NAISVLYFDDMGVPTLKKYRDENKNVV

SEQ ID NO: 118262 - protein, 27 aa, Artificial Sequence
  Cyclic GFR-binding peptide
NAISILYFVGRKPKVLKKYRDENKNVV

SEQ ID NO: 118263 - protein, 27 aa, Artificial Sequence
  Cyclic GFR-binding peptide
SAISMLYLDENEKVVLKNYQDENKNVV

SEQ ID NO: 118264 - protein, 27 aa, Artificial Sequence
  Cyclic GFR-binding peptide
SPISVLYKDDSSNVILKYHYDENKNVV

SEQ ID NO: 118265 - protein, 27 aa, Artificial Sequence
  Cyclic GFR-binding peptide
SAISILYLVGRKPKVLKNYQDENKNVV

SEQ ID NO: 118266 - protein, 27 aa, Artificial Sequence
  Cyclic GFR-binding peptide
NAISVLYFDSSNNVILKKYRDENKNVV

SEQ ID NO: 118267 - protein, 27 aa, Artificial Sequence
  Cyclic GFR-binding peptide
NAISVLYFDDSSNVILKKYRDENKNVV

SEQ ID NO: 118268 - protein, 27 aa, Artificial Sequence
  Cyclic GFR-binding peptide
SATSILYYVGRTPKVLRKHRDENKNVV

SEQ ID NO: 118269 - protein, 29 aa, Artificial Sequence
  Cyclic GFR-binding peptide
SPISVLYKEIVRKKPIFLKYHYDENKNVV

SEQ ID NO: 118270 - protein, 27 aa, Artificial Sequence
  Cyclic GFR-binding peptide
SATSILYYIGKTPKILRKHRDENKNVV

SEQ ID NO: 118271 - protein, 27 aa, Artificial Sequence
  Cyclic GFR-binding peptide
SATSVLYYDDMGVPTLRKHRDENKNVV

SEQ ID NO: 118272 - protein, 27 aa, Artificial Sequence
  Cyclic GFR-binding peptide
SPISVLYKDDMGVPTLKYHYDENKNVV

SEQ ID NO: 118273 - protein, 27 aa, Artificial Sequence
  Cyclic GFR-binding peptide
SPISVLYKDSSNNVILKYHYDENKNVV

SEQ ID NO: 118274 - protein, 27 aa, Artificial Sequence
  Cyclic GFR-binding peptide
SATSVLYYDSSNNVILRKHRDENKNVV

SEQ ID NO: 118275 - protein, 27 aa, Artificial Sequence
  Cyclic GFR-binding peptide
SPISILYKVGRTPKVLKYHYDENKNVV

SEQ ID NO: 118276 - protein, 27 aa, Artificial Sequence
  Cyclic GFR-binding peptide
SATSVLYYDDSSNVILRKHRDENKNVV

SEQ ID NO: 118277 - protein, 27 aa, Artificial Sequence
  Cyclic GFR-binding peptide
SATSMLYYDEYDKVVLRKHRDENKNVV

SEQ ID NO: 118278 - protein, 27 aa, Artificial Sequence
  Cyclic GFR-binding peptide
SAISILYLIGKTPKILKNYQDENKNVV

SEQ ID NO: 118279 - protein, 27 aa, Artificial Sequence
  Cyclic GFR-binding peptide
SAISMLYLDEYDKVVLKNYQDENKNVV

SEQ ID NO: 118280 - protein, 27 aa, Artificial Sequence
  Cyclic GFR-binding peptide
SAISVLYLDDSSNVILKNYQDENKNVV

SEQ ID NO: 118281 - protein, 27 aa, Artificial Sequence
  Cyclic GFR-binding peptide
DENKNVVRYKKLIKPTKGIFYLISIAN

SEQ ID NO: 118282 - protein, 27 aa, Artificial Sequence
  Cyclic GFR-binding peptide
DENKNVVNSLQEVVKDYEDYYLMTLPE

SEQ ID NO: 118283 - protein, 27 aa, Artificial Sequence
  Cyclic GFR-binding peptide
DENKNVVNSLQEIKPTKGIYYVIPLPE

SEQ ID NO: 118284 - protein, 27 aa, Artificial Sequence
  Cyclic GFR-binding peptide
DENKNVVNSLQEVKPKRGVYYLITLPE

SEQ ID NO: 118285 - protein, 27 aa, Artificial Sequence
  Cyclic GFR-binding peptide
DENKNVVNSLQEVKPTRGVYYVIPLPE

SEQ ID NO: 118286 - protein, 27 aa, Artificial Sequence
  Cyclic GFR-binding peptide
DENKNVVRYKKLVVKDYEDFYLMSIAN

SEQ ID NO: 118287 - protein, 27 aa, Artificial Sequence
  Cyclic GFR-binding peptide
DENKNVVEYQKYIVNSSDDIFLVSIPS

SEQ ID NO: 118288 - protein, 27 aa, Artificial Sequence
  Cyclic GFR-binding peptide
DENKNVVEYQKYVKPTRGVIFLISIPS

SEQ ID NO: 118289 - protein, 27 aa, Artificial Sequence
  Cyclic GFR-binding peptide
DENKNVVNSLQEVVKENEDYYLMTLPE

SEQ ID NO: 118290 - protein, 27 aa, Artificial Sequence
  Cyclic GFR-binding peptide
DENKNVVRYKKLVKPTRGVFYLISIAN

SEQ ID NO: 118291 - protein, 27 aa, Artificial Sequence
  Cyclic GFR-binding peptide
DENKNVVNSLQEVVNNASDYYLITLPE

SEQ ID NO: 118292 - protein, 27 aa, Artificial Sequence
  Cyclic GFR-binding peptide
DENKNVVNSLQEVKPKRGVYYVIPLPE

SEQ ID NO: 118293 - protein, 27 aa, Artificial Sequence
  Cyclic GFR-binding peptide
DENKNVVNSLQEVVNNASDYYVIPLPE

SEQ ID NO: 118294 - protein, 27 aa, Artificial Sequence
  Cyclic GFR-binding peptide
DENKNVVNSLQEVKPTRGVYYLITLPE

SEQ ID NO: 118295 - protein, 27 aa, Artificial Sequence
  Cyclic GFR-binding peptide
DENKNVVQYNKLVKPTRGVLYLISIAS

SEQ ID NO: 118296 - protein, 27 aa, Artificial Sequence
  Cyclic GFR-binding peptide
DENKNVVRYKKLVVKENEDFYLMSIAN

SEQ ID NO: 118297 - protein, 27 aa, Artificial Sequence
  Cyclic GFR-binding peptide
DENKNVVEYQKYIKPTKGIIFLISIPS

SEQ ID NO: 118298 - protein, 27 aa, Artificial Sequence
  Cyclic GFR-binding peptide
DENKNVVEYQKYVVNNASDIFLISIPS

SEQ ID NO: 118299 - protein, 27 aa, Artificial Sequence
  Cyclic GFR-binding peptide
DENKNVVRYKKLVKPKRGVFYLISIAN

SEQ ID NO: 118300 - protein, 27 aa, Artificial Sequence
  Cyclic GFR-binding peptide
DENKNVVNSLQEIVNSSDDYYVVPLPE

SEQ ID NO: 118301 - protein, 27 aa, Artificial Sequence
  Cyclic GFR-binding peptide
DENKNVVNSLQEVVKDYEDYYVMPLPE

SEQ ID NO: 118302 - protein, 27 aa, Artificial Sequence
  Cyclic GFR-binding peptide
DENKNVVQYNKLVVKENEDLYLMSIAS

SEQ ID NO: 118303 - protein, 27 aa, Artificial Sequence
  Cyclic GFR-binding peptide
DENKNVVEYQKYVVKENEDIFLMSIPS

SEQ ID NO: 118304 - protein, 27 aa, Artificial Sequence
  Cyclic GFR-binding peptide
DENKNVVQYNKLVKPKRGVLYLISIAS

SEQ ID NO: 118305 - protein, 27 aa, Artificial Sequence
  Cyclic GFR-binding peptide
DENKNVVRYKKLIVNSSDDFYLVSIAN

SEQ ID NO: 118306 - protein, 27 aa, Artificial Sequence
  Cyclic GFR-binding peptide
DENKNVVNSLQEVVKENEDYYVMPLPE

SEQ ID NO: 118307 - protein, 27 aa, Artificial Sequence
  Cyclic GFR-binding peptide
DENKNVVEYQKYVVKDYEDIFLMSIPS

SEQ ID NO: 118308 - protein, 27 aa, Artificial Sequence
  Cyclic GFR-binding peptide
DENKNVVQYNKLVVNNASDLYLISIAS

SEQ ID NO: 118309 - protein, 27 aa, Artificial Sequence
  Cyclic GFR-binding peptide
DENKNVVQYNKLIKPTKGILYLISIAS

SEQ ID NO: 118310 - protein, 27 aa, Artificial Sequence
  Cyclic GFR-binding peptide
DENKNVVNSLQEIKPTKGIYYLITLPE

SEQ ID NO: 118311 - protein, 27 aa, Artificial Sequence
  Cyclic GFR-binding peptide
DENKNVVEYQKYVKPKRGVIFLISIPS

SEQ ID NO: 118312 - protein, 27 aa, Artificial Sequence
  Cyclic GFR-binding peptide
DENKNVVQYNKLVVKDYEDLYLMSIAS

SEQ ID NO: 118313 - protein, 27 aa, Artificial Sequence
  Cyclic GFR-binding peptide
DENKNVVRYKKLVVNNASDFYLISIAN

SEQ ID NO: 118314 - protein, 27 aa, Artificial Sequence
  Cyclic GFR-binding peptide
DENKNVVNSLQEIVNSSDDYYLVTLPE

SEQ ID NO: 118315 - protein, 27 aa, Artificial Sequence
  Cyclic GFR-binding peptide
DENKNVVQYNKLIVNSSDDLYLVSIAS

SEQ ID NO: 118316 - protein, 27 aa, Artificial Sequence
  Cyclic GFR-binding peptide
NAISILYFIGKTPKILKKYRDENKNVV

SEQ ID NO: 118317 - protein, 27 aa, Artificial Sequence
  Cyclic GFR-binding peptide
EPLTMLYYDEYDKVVEQLSNDENKNVV

SEQ ID NO: 118318 - protein, 27 aa, Artificial Sequence
  Cyclic GFR-binding peptide
EPLPIVYYIGKTPKIEQLSNDENKNVV

SEQ ID NO: 118319 - protein, 27 aa, Artificial Sequence
  Cyclic GFR-binding peptide
EPLTILYYVGRKPKVEQLSNDENKNVV

SEQ ID NO: 118320 - protein, 27 aa, Artificial Sequence
  Cyclic GFR-binding peptide
EPLPIVYYVGRTPKVEQLSNDENKNVV

SEQ ID NO: 118321 - protein, 27 aa, Artificial Sequence
  Cyclic GFR-binding peptide
NAISMLYFDEYDKVVLKKYRDENKNVV

SEQ ID NO: 118322 - protein, 27 aa, Artificial Sequence
  Cyclic GFR-binding peptide
SPISVLFIDDSSNVIYKQYEDENKNVV

SEQ ID NO: 118323 - protein, 27 aa, Artificial Sequence
  Cyclic GFR-binding peptide
SPISILFIVGRTPKVYKQYEDENKNVV

SEQ ID NO: 118324 - protein, 27 aa, Artificial Sequence
  Cyclic GFR-binding peptide
EPLTMLYYDENEKVVEQLSNDENKNVV

SEQ ID NO: 118325 - protein, 27 aa, Artificial Sequence
  Cyclic GFR-binding peptide
NAISILYFVGRTPKVLKKYRDENKNVV

SEQ ID NO: 118326 - protein, 27 aa, Artificial Sequence
  Cyclic GFR-binding peptide
EPLTILYYDSANNVVEQLSNDENKNVV

SEQ ID NO: 118327 - protein, 27 aa, Artificial Sequence
  Cyclic GFR-binding peptide
EPLPIVYYVGRKPKVEQLSNDENKNVV

SEQ ID NO: 118328 - protein, 27 aa, Artificial Sequence
  Cyclic GFR-binding peptide
EPLPIVYYDSANNVVEQLSNDENKNVV

SEQ ID NO: 118329 - protein, 27 aa, Artificial Sequence
  Cyclic GFR-binding peptide
EPLTILYYVGRTPKVEQLSNDENKNVV

SEQ ID NO: 118330 - protein, 27 aa, Artificial Sequence
  Cyclic GFR-binding peptide
SAISILYLVGRTPKVLKNYQDENKNVV

SEQ ID NO: 118331 - protein, 27 aa, Artificial Sequence
  Cyclic GFR-binding peptide
NAISMLYFDENEKVVLKKYRDENKNVV

SEQ ID NO: 118332 - protein, 27 aa, Artificial Sequence
  Cyclic GFR-binding peptide
SPISILFIIGKTPKIYKQYEDENKNVV

SEQ ID NO: 118333 - protein, 27 aa, Artificial Sequence
  Cyclic GFR-binding peptide
SPISILFIDSANNVVYKQYEDENKNVV

SEQ ID NO: 118334 - protein, 27 aa, Artificial Sequence
  Cyclic GFR-binding peptide
NAISILYFVGRKPKVLKKYRDENKNVV

SEQ ID NO: 118335 - protein, 27 aa, Artificial Sequence
  Cyclic GFR-binding peptide
EPLPVVYYDDSSNVIEQLSNDENKNVV

SEQ ID NO: 118336 - protein, 27 aa, Artificial Sequence
  Cyclic GFR-binding peptide
EPLPMVYYDEYDKVVEQLSNDENKNVV

SEQ ID NO: 118337 - protein, 27 aa, Artificial Sequence
  Cyclic GFR-binding peptide
SAISMLYLDENEKVVLKNYQDENKNVV

SEQ ID NO: 118338 - protein, 27 aa, Artificial Sequence
  Cyclic GFR-binding peptide
SPISMLFIDENEKVVYKQYEDENKNVV

SEQ ID NO: 118339 - protein, 27 aa, Artificial Sequence
  Cyclic GFR-binding peptide
SAISILYLVGRKPKVLKNYQDENKNVV

SEQ ID NO: 118340 - protein, 27 aa, Artificial Sequence
  Cyclic GFR-binding peptide
NAISVLYFDDSSNVILKKYRDENKNVV

SEQ ID NO: 118341 - protein, 27 aa, Artificial Sequence
  Cyclic GFR-binding peptide
EPLPMVYYDENEKVVEQLSNDENKNVV

SEQ ID NO: 118342 - protein, 27 aa, Artificial Sequence
  Cyclic GFR-binding peptide
SPISMLFIDEYDKVVYKQYEDENKNVV

SEQ ID NO: 118343 - protein, 27 aa, Artificial Sequence
  Cyclic GFR-binding peptide
SAISILYLDSANNVVLKNYQDENKNVV

SEQ ID NO: 118344 - protein, 27 aa, Artificial Sequence
  Cyclic GFR-binding peptide
SAISILYLIGKTPKILKNYQDENKNVV

SEQ ID NO: 118345 - protein, 27 aa, Artificial Sequence
  Cyclic GFR-binding peptide
EPLTILYYIGKTPKIEQLSNDENKNVV

SEQ ID NO: 118346 - protein, 27 aa, Artificial Sequence
  Cyclic GFR-binding peptide
SPISILFIVGRKPKVYKQYEDENKNVV

SEQ ID NO: 118347 - protein, 27 aa, Artificial Sequence
  Cyclic GFR-binding peptide
SAISMLYLDEYDKVVLKNYQDENKNVV

SEQ ID NO: 118348 - protein, 27 aa, Artificial Sequence
  Cyclic GFR-binding peptide
NAISILYFDSANNVVLKKYRDENKNVV

SEQ ID NO: 118349 - protein, 27 aa, Artificial Sequence
  Cyclic GFR-binding peptide
EPLTVLYYDDSSNVIEQLSNDENKNVV

SEQ ID NO: 118350 - protein, 27 aa, Artificial Sequence
  Cyclic GFR-binding peptide
SAISVLYLDDSSNVILKNYQDENKNVV

SEQ ID NO: 118351 - protein, 29 aa, Artificial Sequence
  Cyclic GFR-binding peptide
DENKNVVVTAKKLKPKKRVYEIKRVQVPR

SEQ ID NO: 118352 - protein, 29 aa, Artificial Sequence
  Cyclic GFR-binding peptide
DENKNVVVQVEKLKPKKRVYEVKAVKVSR

SEQ ID NO: 118353 - protein, 29 aa, Artificial Sequence
  Cyclic GFR-binding peptide
DENKNVVVQVEKFIPKKRVIEVKAVKVSR

SEQ ID NO: 118354 - protein, 29 aa, Artificial Sequence
  Cyclic GFR-binding peptide
DENKNVVVQVEKHQGQHPKIRVKAMKVSR

SEQ ID NO: 118355 - protein, 29 aa, Artificial Sequence
  Cyclic GFR-binding peptide
DENKNVVVTAKKHQGQHPKIRIKRMQVPR

SEQ ID NO: 118356 - protein, 29 aa, Artificial Sequence
  Cyclic GFR-binding peptide
DENKNVVSMEGLLKPKKRVYEMIQVTINS

SEQ ID NO: 118357 - protein, 29 aa, Artificial Sequence
  Cyclic GFR-binding peptide
DENKNVVSMEGIFIPKKRVIEMIQVTINS

SEQ ID NO: 118358 - protein, 29 aa, Artificial Sequence
  Cyclic GFR-binding peptide
DENKNVVSMEGLHQGQHPKIRMIQMTINS

SEQ ID NO: 118359 - protein, 29 aa, Artificial Sequence
  Cyclic GFR-binding peptide
DENKNVVSMEGILKPKKRVYEMIQVTINS

SEQ ID NO: 118360 - protein, 29 aa, Artificial Sequence
  Cyclic GFR-binding peptide
DENKNVVSMEGLFIPKKRVIEMIQVTINS

SEQ ID NO: 118361 - protein, 29 aa, Artificial Sequence
  Cyclic GFR-binding peptide
DENKNVVVTAKKFIPKKRVIEIKRVQVPR

SEQ ID NO: 118362 - protein, 29 aa, Artificial Sequence
  Cyclic GFR-binding peptide
DENKNVVSMEGIHQGQHPKIRMIQMTINS

SEQ ID NO: 118363 - protein, 29 aa, Artificial Sequence
  Cyclic GFR-binding peptide
RPVQVRKIEYVRKKPKLKKATVDENKNVV

SEQ ID NO: 118364 - protein, 29 aa, Artificial Sequence
  Cyclic GFR-binding peptide
RSVKVAKVEYVRKKPKLKEVQVDENKNVV

SEQ ID NO: 118365 - protein, 29 aa, Artificial Sequence
  Cyclic GFR-binding peptide
RSVKVAKVEIVRKKPIFKEVQVDENKNVV

SEQ ID NO: 118366 - protein, 29 aa, Artificial Sequence
  Cyclic GFR-binding peptide
RSVKMAKVRIKPHQGQHKEVQVDENKNVV

SEQ ID NO: 118367 - protein, 29 aa, Artificial Sequence
  Cyclic GFR-binding peptide
RPVQMRKIRIKPHQGQHKKATVDENKNVV

SEQ ID NO: 118368 - protein, 29 aa, Artificial Sequence
  Cyclic GFR-binding peptide
SNITVQIMEYVRKKPKLLGEMSDENKNVV

SEQ ID NO: 118369 - protein, 29 aa, Artificial Sequence
  Cyclic GFR-binding peptide
SNITVQIMEIVRKKPIFIGEMSDENKNVV

SEQ ID NO: 118370 - protein, 29 aa, Artificial Sequence
  Cyclic GFR-binding peptide
SNITMQIMRIKPHQGQHLGEMSDENKNVV

SEQ ID NO: 118371 - protein, 29 aa, Artificial Sequence
  Cyclic GFR-binding peptide
SNITVQIMEYVRKKPKLIGEMSDENKNVV

SEQ ID NO: 118372 - protein, 29 aa, Artificial Sequence
  Cyclic GFR-binding peptide
SNITVQIMEIVRKKPIFLGEMSDENKNVV

SEQ ID NO: 118373 - protein, 29 aa, Artificial Sequence
  Cyclic GFR-binding peptide
RPVQVRKIEIVRKKPIFKKATVDENKNVV

SEQ ID NO: 118374 - protein, 29 aa, Artificial Sequence
  Cyclic GFR-binding peptide
SNITMQIMRIKPHQGQHIGEMSDENKNVV

SEQ ID NO: 118375 - protein, 29 aa, Artificial Sequence
  Cyclic GFR-binding peptide
DENKNVVVTAKKLKPKKRVYEIKRVQVPR

SEQ ID NO: 118376 - protein, 29 aa, Artificial Sequence
  Cyclic GFR-binding peptide
DENKNVVVQVEKLKPKKRVYEVKAVKVSR

SEQ ID NO: 118377 - protein, 29 aa, Artificial Sequence
  Cyclic GFR-binding peptide
DENKNVVVQVEKFIPKKRVIEVKAVKVSR

SEQ ID NO: 118378 - protein, 29 aa, Artificial Sequence
  Cyclic GFR-binding peptide
DENKNVVVQVEKHQGQHPKIRVKAMKVSR

SEQ ID NO: 118379 - protein, 29 aa, Artificial Sequence
  Cyclic GFR-binding peptide
DENKNVVVTAKKHQGQHPKIRIKRMQVPR

SEQ ID NO: 118380 - protein, 29 aa, Artificial Sequence
  Cyclic GFR-binding peptide
DENKNVVSMEGLLKPKKRVYEMIQVTINS

SEQ ID NO: 118381 - protein, 29 aa, Artificial Sequence
  Cyclic GFR-binding peptide
DENKNVVSMEGIFIPKKRVIEMIQVTINS

SEQ ID NO: 118382 - protein, 29 aa, Artificial Sequence
  Cyclic GFR-binding peptide
DENKNVVSMEGLHQGQHPKIRMIQMTINS

SEQ ID NO: 118383 - protein, 29 aa, Artificial Sequence
  Cyclic GFR-binding peptide
DENKNVVSMEGILKPKKRVYEMIQVTINS

SEQ ID NO: 118384 - protein, 29 aa, Artificial Sequence
  Cyclic GFR-binding peptide
DENKNVVSMEGLFIPKKRVIEMIQVTINS

SEQ ID NO: 118385 - protein, 29 aa, Artificial Sequence
  Cyclic GFR-binding peptide
DENKNVVVTAKKFIPKKRVIEIKRVQVPR

SEQ ID NO: 118386 - protein, 29 aa, Artificial Sequence
  Cyclic GFR-binding peptide
DENKNVVSMEGIHQGQHPKIRMIQMTINS

SEQ ID NO: 118387 - protein, 29 aa, Artificial Sequence
  Cyclic GFR-binding peptide
RPVQVRKIEYVRKKPKLKKATVDENKNVV

SEQ ID NO: 118388 - protein, 29 aa, Artificial Sequence
  Cyclic GFR-binding peptide
RSVKVAKVEYVRKKPKLKEVQVDENKNVV

SEQ ID NO: 118389 - protein, 29 aa, Artificial Sequence
  Cyclic GFR-binding peptide
RSVKVAKVEIVRKKPIFKEVQVDENKNVV

SEQ ID NO: 118390 - protein, 29 aa, Artificial Sequence
  Cyclic GFR-binding peptide
RSVKMAKVRIKPHQGQHKEVQVDENKNVV

SEQ ID NO: 118391 - protein, 29 aa, Artificial Sequence
  Cyclic GFR-binding peptide
RPVQMRKIRIKPHQGQHKKATVDENKNVV

SEQ ID NO: 118392 - protein, 29 aa, Artificial Sequence
  Cyclic GFR-binding peptide
SNITVQIMEYVRKKPKLLGEMSDENKNVV

SEQ ID NO: 118393 - protein, 29 aa, Artificial Sequence
  Cyclic GFR-binding peptide
SNITVQIMEIVRKKPIFIGEMSDENKNVV

SEQ ID NO: 118394 - protein, 29 aa, Artificial Sequence
  Cyclic GFR-binding peptide
SNITMQIMRIKPHQGQHLGEMSDENKNVV

SEQ ID NO: 118395 - protein, 29 aa, Artificial Sequence
  Cyclic GFR-binding peptide
SNITVQIMEYVRKKPKLIGEMSDENKNVV

SEQ ID NO: 118396 - protein, 29 aa, Artificial Sequence
  Cyclic GFR-binding peptide
SNITVQIMEIVRKKPIFLGEMSDENKNVV

SEQ ID NO: 118397 - protein, 29 aa, Artificial Sequence
  Cyclic GFR-binding peptide
RPVQVRKIEIVRKKPIFKKATVDENKNVV

SEQ ID NO: 118398 - protein, 29 aa, Artificial Sequence
  Cyclic GFR-binding peptide
SNITMQIMRIKPHQGQHIGEMSDENKNVV

SEQ ID NO: 118399 - protein, 27 aa, Artificial Sequence
  Cyclic GFR-binding peptide
DENKNVVEYQKYVVKENEDIYLMSIPS

SEQ ID NO: 118400 - protein, 27 aa, Artificial Sequence
  Cyclic GFR-binding peptide
DENKNVVRYKKLIKPTKGIFYLISIAN

SEQ ID NO: 118401 - protein, 27 aa, Artificial Sequence
  Cyclic GFR-binding peptide
DENKNVVEYKFKVKPTRGVLYLISIPE

SEQ ID NO: 118402 - protein, 27 aa, Artificial Sequence
  Cyclic GFR-binding peptide
DENKNVVYHYKLVVKDYEDKYLMSIPS

SEQ ID NO: 118403 - protein, 27 aa, Artificial Sequence
  Cyclic GFR-binding peptide
DENKNVVEYKFKTPVGMDDLYLVSIPE

SEQ ID NO: 118404 - protein, 27 aa, Artificial Sequence
  Cyclic GFR-binding peptide
DENKNVVEYQKYVKPKRGVIYLISIPS

SEQ ID NO: 118405 - protein, 27 aa, Artificial Sequence
  Cyclic GFR-binding peptide
DENKNVVRYKKLVVKDYEDFYLMSIAN

SEQ ID NO: 118406 - protein, 27 aa, Artificial Sequence
  Cyclic GFR-binding peptide
DENKNVVEYQKYVVKDYEDIYLMSIPS

SEQ ID NO: 118407 - protein, 27 aa, Artificial Sequence
  Cyclic GFR-binding peptide
DENKNVVRYKKLVKPTRGVFYLISIAN

SEQ ID NO: 118408 - protein, 27 aa, Artificial Sequence
  Cyclic GFR-binding peptide
DENKNVVYHYKLIKPTKGIKYLISIPS

SEQ ID NO: 118409 - protein, 27 aa, Artificial Sequence
  Cyclic GFR-binding peptide
DENKNVVYHYKLVVKENEDKYLMSIPS

SEQ ID NO: 118410 - protein, 27 aa, Artificial Sequence
  Cyclic GFR-binding peptide
DENKNVVYHYKLVKPKRGVKYLISIPS

SEQ ID NO: 118411 - protein, 27 aa, Artificial Sequence
  Cyclic GFR-binding peptide
DENKNVVEYKFKIKPTKGILYLISIPE

SEQ ID NO: 118412 - protein, 27 aa, Artificial Sequence
  Cyclic GFR-binding peptide
DENKNVVEYQKYIKPTKGIIYLISIPS

SEQ ID NO: 118413 - protein, 27 aa, Artificial Sequence
  Cyclic GFR-binding peptide
DENKNVVRYKKLVVKENEDFYLMSIAN

SEQ ID NO: 118414 - protein, 27 aa, Artificial Sequence
  Cyclic GFR-binding peptide
DENKNVVRYKKLVVNNAADFYLISIAN

SEQ ID NO: 118415 - protein, 27 aa, Artificial Sequence
  Cyclic GFR-binding peptide
DENKNVVYHYKLYTVVGKDKYLISIPS

SEQ ID NO: 118416 - protein, 27 aa, Artificial Sequence
  Cyclic GFR-binding peptide
DENKNVVRYKKLTPVGMDDFYLVSIAN

SEQ ID NO: 118417 - protein, 27 aa, Artificial Sequence
  Cyclic GFR-binding peptide
DENKNVVRYKKLVKPKRGVFYLISIAN

SEQ ID NO: 118418 - protein, 27 aa, Artificial Sequence
  Cyclic GFR-binding peptide
DENKNVVYHYKLVVNNAADKYLISIPS

SEQ ID NO: 118419 - protein, 27 aa, Artificial Sequence
  Cyclic GFR-binding peptide
DENKNVVYHYKLIVNSSDDKYLVSIPS

SEQ ID NO: 118420 - protein, 27 aa, Artificial Sequence
  Cyclic GFR-binding peptide
DENKNVVRYKKLIVNNSSDFYLVSIAN

SEQ ID NO: 118421 - protein, 27 aa, Artificial Sequence
  Cyclic GFR-binding peptide
DENKNVVRYKKLYTVVGKDFYLISIAN

SEQ ID NO: 118422 - protein, 27 aa, Artificial Sequence
  Cyclic GFR-binding peptide
DENKNVVEYQKYVVNNAADIYLISIPS

SEQ ID NO: 118423 - protein, 27 aa, Artificial Sequence
  Cyclic GFR-binding peptide
DENKNVVRYKKLIVNSSDDFYLVSIAN

SEQ ID NO: 118424 - protein, 27 aa, Artificial Sequence
  Cyclic GFR-binding peptide
DENKNVVEYKFKIVNNSSDLYLVSIPE

SEQ ID NO: 118425 - protein, 27 aa, Artificial Sequence
  Cyclic GFR-binding peptide
DENKNVVEYQKYVKPTRGVIYLISIPS

SEQ ID NO: 118426 - protein, 27 aa, Artificial Sequence
  Cyclic GFR-binding peptide
DENKNVVEYQKYIVNSSDDIYLVSIPS

SEQ ID NO: 118427 - protein, 27 aa, Artificial Sequence
  Cyclic GFR-binding peptide
DENKNVVYHYKLTPVGMDDKYLVSIPS

SEQ ID NO: 118428 - protein, 27 aa, Artificial Sequence
  Cyclic GFR-binding peptide
DENKNVVYHYKLIVNNSSDKYLVSIPS

SEQ ID NO: 118429 - protein, 27 aa, Artificial Sequence
  Cyclic GFR-binding peptide
DENKNVVEYKFKIVNSSDDLYLVSIPE

SEQ ID NO: 118430 - protein, 27 aa, Artificial Sequence
  Cyclic GFR-binding peptide
DENKNVVYHYKLVKPTRGVKYLISIPS

SEQ ID NO: 118431 - protein, 27 aa, Artificial Sequence
  Cyclic GFR-binding peptide
DENKNVVEYKFKVKPKRGVLYLISIPE

SEQ ID NO: 118432 - protein, 27 aa, Artificial Sequence
  Cyclic GFR-binding peptide
DENKNVVEYQKYYTVVGKDIYLISIPS

SEQ ID NO: 118433 - protein, 27 aa, Artificial Sequence
  Cyclic GFR-binding peptide
DENKNVVEYKFKVVKENEDLYLMSIPE

SEQ ID NO: 118434 - protein, 27 aa, Artificial Sequence
  Cyclic GFR-binding peptide
DENKNVVEYQKYTPVGMDDIYLVSIPS

SEQ ID NO: 118435 - protein, 27 aa, Artificial Sequence
  Cyclic GFR-binding peptide
DENKNVVEYQKYIVNNSSDIYLVSIPS

SEQ ID NO: 118436 - protein, 27 aa, Artificial Sequence
  Cyclic GFR-binding peptide
DENKNVVEYKFKVVKDYEDLYLMSIPE

SEQ ID NO: 118437 - protein, 27 aa, Artificial Sequence
  Cyclic GFR-binding peptide
DENKNVVEYKFKYTVVGKDLYLISIPE

SEQ ID NO: 118438 - protein, 27 aa, Artificial Sequence
  Cyclic GFR-binding peptide
DENKNVVEYKFKVVNNAADLYLISIPE

SEQ ID NO: 118439 - protein, 27 aa, Artificial Sequence
  Cyclic GFR-binding peptide
SPISMLYIDENEKVVYKQYEDENKNVV

SEQ ID NO: 118440 - protein, 27 aa, Artificial Sequence
  Cyclic GFR-binding peptide
NAISILYFIGKTPKILKKYRDENKNVV

SEQ ID NO: 118441 - protein, 27 aa, Artificial Sequence
  Cyclic GFR-binding peptide
EPISILYLVGRTPKVKFKYEDENKNVV

SEQ ID NO: 118442 - protein, 27 aa, Artificial Sequence
  Cyclic GFR-binding peptide
SPISMLYKDEYDKVVLKYHYDENKNVV

SEQ ID NO: 118443 - protein, 27 aa, Artificial Sequence
  Cyclic GFR-binding peptide
EPISVLYLDDMGVPTKFKYEDENKNVV

SEQ ID NO: 118444 - protein, 27 aa, Artificial Sequence
  Cyclic GFR-binding peptide
SPISILYIVGRKPKVYKQYEDENKNVV

SEQ ID NO: 118445 - protein, 27 aa, Artificial Sequence
  Cyclic GFR-binding peptide
NAISMLYFDEYDKVVLKKYRDENKNVV

SEQ ID NO: 118446 - protein, 27 aa, Artificial Sequence
  Cyclic GFR-binding peptide
SPISMLYIDEYDKVVYKQYEDENKNVV

SEQ ID NO: 118447 - protein, 27 aa, Artificial Sequence
  Cyclic GFR-binding peptide
NAISILYFVGRTPKVLKKYRDENKNVV

SEQ ID NO: 118448 - protein, 27 aa, Artificial Sequence
  Cyclic GFR-binding peptide
SPISILYKIGKTPKILKYHYDENKNVV

SEQ ID NO: 118449 - protein, 27 aa, Artificial Sequence
  Cyclic GFR-binding peptide
SPISMLYKDENEKVVLKYHYDENKNVV

SEQ ID NO: 118450 - protein, 27 aa, Artificial Sequence
  Cyclic GFR-binding peptide
SPISILYKVGRKPKVLKYHYDENKNVV

SEQ ID NO: 118451 - protein, 27 aa, Artificial Sequence
  Cyclic GFR-binding peptide
EPISILYLIGKTPKIKFKYEDENKNVV

SEQ ID NO: 118452 - protein, 27 aa, Artificial Sequence
  Cyclic GFR-binding peptide
SPISILYIIGKTPKIYKQYEDENKNVV

SEQ ID NO: 118453 - protein, 27 aa, Artificial Sequence
  Cyclic GFR-binding peptide
NAISMLYFDENEKVVLKKYRDENKNVV

SEQ ID NO: 118454 - protein, 27 aa, Artificial Sequence
  Cyclic GFR-binding peptide
NAISILYFDAANNVVLKKYRDENKNVV

SEQ ID NO: 118455 - protein, 27 aa, Artificial Sequence
  Cyclic GFR-binding peptide
SPISILYKDKGVVTYLKYHYDENKNVV

SEQ ID NO: 118456 - protein, 27 aa, Artificial Sequence
  Cyclic GFR-binding peptide
NAISVLYFDDMGVPTLKKYRDENKNVV

SEQ ID NO: 118457 - protein, 27 aa, Artificial Sequence
  Cyclic GFR-binding peptide
NAISILYFVGRKPKVLKKYRDENKNVV

SEQ ID NO: 118458 - protein, 27 aa, Artificial Sequence
  Cyclic GFR-binding peptide
SPISILYKDAANNVVLKYHYDENKNVV

SEQ ID NO: 118459 - protein, 27 aa, Artificial Sequence
  Cyclic GFR-binding peptide
SPISVLYKDDSSNVILKYHYDENKNVV

SEQ ID NO: 118460 - protein, 27 aa, Artificial Sequence
  Cyclic GFR-binding peptide
NAISVLYFDSSNNVILKKYRDENKNVV

SEQ ID NO: 118461 - protein, 27 aa, Artificial Sequence
  Cyclic GFR-binding peptide
NAISILYFDKGVVTYLKKYRDENKNVV

SEQ ID NO: 118462 - protein, 27 aa, Artificial Sequence
  Cyclic GFR-binding peptide
SPISILYIDAANNVVYKQYEDENKNVV

SEQ ID NO: 118463 - protein, 27 aa, Artificial Sequence
  Cyclic GFR-binding peptide
NAISVLYFDDSSNVILKKYRDENKNVV

SEQ ID NO: 118464 - protein, 27 aa, Artificial Sequence
  Cyclic GFR-binding peptide
EPISVLYLDSSNNVIKFKYEDENKNVV

SEQ ID NO: 118465 - protein, 27 aa, Artificial Sequence
  Cyclic GFR-binding peptide
SPISILYIVGRTPKVYKQYEDENKNVV

SEQ ID NO: 118466 - protein, 27 aa, Artificial Sequence
  Cyclic GFR-binding peptide
SPISVLYIDDSSNVIYKQYEDENKNVV

SEQ ID NO: 118467 - protein, 27 aa, Artificial Sequence
  Cyclic GFR-binding peptide
SPISVLYKDDMGVPTLKYHYDENKNVV

SEQ ID NO: 118468 - protein, 27 aa, Artificial Sequence
  Cyclic GFR-binding peptide
SPISVLYKDSSNNVILKYHYDENKNVV

SEQ ID NO: 118469 - protein, 27 aa, Artificial Sequence
  Cyclic GFR-binding peptide
EPISVLYLDDSSNVIKFKYEDENKNVV

SEQ ID NO: 118470 - protein, 27 aa, Artificial Sequence
  Cyclic GFR-binding peptide
SPISILYKVGRTPKVLKYHYDENKNVV

SEQ ID NO: 118471 - protein, 27 aa, Artificial Sequence
  Cyclic GFR-binding peptide
EPISILYLVGRKPKVKFKYEDENKNVV

SEQ ID NO: 118472 - protein, 27 aa, Artificial Sequence
  Cyclic GFR-binding peptide
SPISILYIDKGVVTYYKQYEDENKNVV

SEQ ID NO: 118473 - protein, 27 aa, Artificial Sequence
  Cyclic GFR-binding peptide
EPISMLYLDENEKVVKFKYEDENKNVV

SEQ ID NO: 118474 - protein, 27 aa, Artificial Sequence
  Cyclic GFR-binding peptide
SPISVLYIDDMGVPTYKQYEDENKNVV

SEQ ID NO: 118475 - protein, 27 aa, Artificial Sequence
  Cyclic GFR-binding peptide
SPISVLYIDSSNNVIYKQYEDENKNVV

SEQ ID NO: 118476 - protein, 27 aa, Artificial Sequence
  Cyclic GFR-binding peptide
EPISMLYLDEYDKVVKFKYEDENKNVV

SEQ ID NO: 118477 - protein, 27 aa, Artificial Sequence
  Cyclic GFR-binding peptide
EPISILYLDKGVVTYKFKYEDENKNVV

SEQ ID NO: 118478 - protein, 27 aa, Artificial Sequence
  Cyclic GFR-binding peptide
EPISILYLDAANNVVKFKYEDENKNVV

SEQ ID NO: 118479 - protein, 27 aa, Artificial Sequence
  Cyclic GFR-binding peptide
DENKNVVPIKGYIIQQKDNFYLMNIPS

SEQ ID NO: 118480 - protein, 27 aa, Artificial Sequence
  Cyclic GFR-binding peptide
DENKNVVPIKGYVVKDYEDFYLMNIPS

SEQ ID NO: 118481 - protein, 27 aa, Artificial Sequence
  Cyclic GFR-binding peptide
DENKNVVPIKGYIVNSSDDFYLVNIPS

SEQ ID NO: 118482 - protein, 27 aa, Artificial Sequence
  Cyclic GFR-binding peptide
DENKNVVPIKGYLLVRGNDFYLMNIPS

SEQ ID NO: 118483 - protein, 27 aa, Artificial Sequence
  Cyclic GFR-binding peptide
DENKNVVPIKGYVVNNAADFYLINIPS

SEQ ID NO: 118484 - protein, 27 aa, Artificial Sequence
  Cyclic GFR-binding peptide
DENKNVVPIKGYVVKENEDFYLMNIPS

SEQ ID NO: 118485 - protein, 27 aa, Artificial Sequence
  Cyclic GFR-binding peptide
DENKNVVPIKGYVVNNASDFYLINIPS

SEQ ID NO: 118486 - protein, 27 aa, Artificial Sequence
  Cyclic GFR-binding peptide
DENKNVVPIKGYYTVVGKDFYLINIPS

SEQ ID NO: 118487 - protein, 27 aa, Artificial Sequence
  Cyclic GFR-binding peptide
DENKNVVPIKGYTPVGMDDFYLVNIPS

SEQ ID NO: 118488 - protein, 27 aa, Artificial Sequence
  Cyclic GFR-binding peptide
DENKNVVPIKGYIVNNSSDFYLVNIPS

SEQ ID NO: 118489 - protein, 27 aa, Artificial Sequence
  Cyclic GFR-binding peptide
SPINMLYFNDKQQIIYGKIPDENKNVV

SEQ ID NO: 118490 - protein, 27 aa, Artificial Sequence
  Cyclic GFR-binding peptide
SPINMLYFDEYDKVVYGKIPDENKNVV

SEQ ID NO: 118491 - protein, 27 aa, Artificial Sequence
  Cyclic GFR-binding peptide
SPINVLYFDDSSNVIYGKIPDENKNVV

SEQ ID NO: 118492 - protein, 27 aa, Artificial Sequence
  Cyclic GFR-binding peptide
SPINMLYFDNGRVLLYGKIPDENKNVV

SEQ ID NO: 118493 - protein, 27 aa, Artificial Sequence
  Cyclic GFR-binding peptide
SPINILYFDAANNVVYGKIPDENKNVV

SEQ ID NO: 118494 - protein, 27 aa, Artificial Sequence
  Cyclic GFR-binding peptide
SPINMLYFDENEKVVYGKIPDENKNVV

SEQ ID NO: 118495 - protein, 27 aa, Artificial Sequence
  Cyclic GFR-binding peptide
SPINILYFDSANNVVYGKIPDENKNVV

SEQ ID NO: 118496 - protein, 27 aa, Artificial Sequence
  Cyclic GFR-binding peptide
SPINILYFDKGVVTYYGKIPDENKNVV

SEQ ID NO: 118497 - protein, 27 aa, Artificial Sequence
  Cyclic GFR-binding peptide
SPINVLYFDDMGVPTYGKIPDENKNVV

SEQ ID NO: 118498 - protein, 27 aa, Artificial Sequence
  Cyclic GFR-binding peptide
SPINVLYFDSSNNVIYGKIPDENKNVV

SEQ ID NO: 118499 - protein, 27 aa, Artificial Sequence
  Cyclic GFR-binding peptide
DENKNVVPIKGYIIQQKDNFYLMNIPS

SEQ ID NO: 118500 - protein, 27 aa, Artificial Sequence
  Cyclic GFR-binding peptide
DENKNVVPIKGYVVKDYEDFYLMNIPS

SEQ ID NO: 118501 - protein, 27 aa, Artificial Sequence
  Cyclic GFR-binding peptide
DENKNVVPIKGYIVNSSDDFYLVNIPS

SEQ ID NO: 118502 - protein, 27 aa, Artificial Sequence
  Cyclic GFR-binding peptide
DENKNVVPIKGYLLVRGNDFYLMNIPS

SEQ ID NO: 118503 - protein, 27 aa, Artificial Sequence
  Cyclic GFR-binding peptide
DENKNVVPIKGYVVNNAADFYLINIPS

SEQ ID NO: 118504 - protein, 27 aa, Artificial Sequence
  Cyclic GFR-binding peptide
DENKNVVPIKGYVVKENEDFYLMNIPS

SEQ ID NO: 118505 - protein, 27 aa, Artificial Sequence
  Cyclic GFR-binding peptide
DENKNVVPIKGYVVNNASDFYLINIPS

SEQ ID NO: 118506 - protein, 27 aa, Artificial Sequence
  Cyclic GFR-binding peptide
DENKNVVPIKGYYTVVGKDFYLINIPS

SEQ ID NO: 118507 - protein, 27 aa, Artificial Sequence
  Cyclic GFR-binding peptide
DENKNVVPIKGYTPVGMDDFYLVNIPS

SEQ ID NO: 118508 - protein, 27 aa, Artificial Sequence
  Cyclic GFR-binding peptide
DENKNVVPIKGYIVNNSSDFYLVNIPS

SEQ ID NO: 118509 - protein, 27 aa, Artificial Sequence
  Cyclic GFR-binding peptide
SPINMLYFNDKQQIIYGKIPDENKNVV

SEQ ID NO: 118510 - protein, 27 aa, Artificial Sequence
  Cyclic GFR-binding peptide
SPINMLYFDEYDKVVYGKIPDENKNVV

SEQ ID NO: 118511 - protein, 27 aa, Artificial Sequence
  Cyclic GFR-binding peptide
SPINVLYFDDSSNVIYGKIPDENKNVV

SEQ ID NO: 118512 - protein, 27 aa, Artificial Sequence
  Cyclic GFR-binding peptide
SPINMLYFDNGRVLLYGKIPDENKNVV

SEQ ID NO: 118513 - protein, 27 aa, Artificial Sequence
  Cyclic GFR-binding peptide
SPINILYFDAANNVVYGKIPDENKNVV

SEQ ID NO: 118514 - protein, 27 aa, Artificial Sequence
  Cyclic GFR-binding peptide
SPINMLYFDENEKVVYGKIPDENKNVV

SEQ ID NO: 118515 - protein, 27 aa, Artificial Sequence
  Cyclic GFR-binding peptide
SPINILYFDSANNVVYGKIPDENKNVV

SEQ ID NO: 118516 - protein, 27 aa, Artificial Sequence
  Cyclic GFR-binding peptide
SPINILYFDKGVVTYYGKIPDENKNVV

SEQ ID NO: 118517 - protein, 27 aa, Artificial Sequence
  Cyclic GFR-binding peptide
SPINVLYFDDMGVPTYGKIPDENKNVV

SEQ ID NO: 118518 - protein, 27 aa, Artificial Sequence
  Cyclic GFR-binding peptide
SPINVLYFDSSNNVIYGKIPDENKNVV

SEQ ID NO: 118519 - protein, 27 aa, Artificial Sequence
  Cyclic GFR-binding peptide
DENKNVVRYKKLIKPTKGIFYLISIAN

SEQ ID NO: 118520 - protein, 27 aa, Artificial Sequence
  Cyclic GFR-binding peptide
DENKNVVRYKKLVVKDYEDFYLMSIAN

SEQ ID NO: 118521 - protein, 27 aa, Artificial Sequence
  Cyclic GFR-binding peptide
DENKNVVRYKKLVKPTRGVFYLISIAN

SEQ ID NO: 118522 - protein, 27 aa, Artificial Sequence
  Cyclic GFR-binding peptide
DENKNVVRYKKLVVKENEDFYLMSIAN

SEQ ID NO: 118523 - protein, 27 aa, Artificial Sequence
  Cyclic GFR-binding peptide
DENKNVVRYKKLVKPKRGVFYLISIAN

SEQ ID NO: 118524 - protein, 27 aa, Artificial Sequence
  Cyclic GFR-binding peptide
DENKNVVRYKKLIVNSSDDFYLVSIAN

SEQ ID NO: 118525 - protein, 27 aa, Artificial Sequence
  Cyclic GFR-binding peptide
DENKNVVRYKKLVVNNASDFYLISIAN

SEQ ID NO: 118526 - protein, 27 aa, Artificial Sequence
  Cyclic GFR-binding peptide
NAISILYFIGKTPKILKKYRDENKNVV

SEQ ID NO: 118527 - protein, 27 aa, Artificial Sequence
  Cyclic GFR-binding peptide
NAISMLYFDEYDKVVLKKYRDENKNVV

SEQ ID NO: 118528 - protein, 27 aa, Artificial Sequence
  Cyclic GFR-binding peptide
NAISILYFVGRTPKVLKKYRDENKNVV

SEQ ID NO: 118529 - protein, 27 aa, Artificial Sequence
  Cyclic GFR-binding peptide
NAISMLYFDENEKVVLKKYRDENKNVV

SEQ ID NO: 118530 - protein, 27 aa, Artificial Sequence
  Cyclic GFR-binding peptide
NAISILYFVGRKPKVLKKYRDENKNVV

SEQ ID NO: 118531 - protein, 27 aa, Artificial Sequence
  Cyclic GFR-binding peptide
NAISVLYFDDSSNVILKKYRDENKNVV

SEQ ID NO: 118532 - protein, 27 aa, Artificial Sequence
  Cyclic GFR-binding peptide
NAISILYFDSANNVVLKKYRDENKNVV

SEQ ID NO: 118533 - protein, 27 aa, Artificial Sequence
  Cyclic GFR-binding peptide
DENKNVVEYQKYVVKENEDIYLMSIPS

SEQ ID NO: 118534 - protein, 27 aa, Artificial Sequence
  Cyclic GFR-binding peptide
DENKNVVNSLQEVVKDYEDYYLMTLPE

SEQ ID NO: 118535 - protein, 27 aa, Artificial Sequence
  Cyclic GFR-binding peptide
DENKNVVEYQKYVVKENEDIFLMSIPS

SEQ ID NO: 118536 - protein, 27 aa, Artificial Sequence
  Cyclic GFR-binding peptide
DENKNVVNSLQEIKPTKGIYYVIPLPE

SEQ ID NO: 118537 - protein, 27 aa, Artificial Sequence
  Cyclic GFR-binding peptide
DENKNVVNSLQEVKPKRGVYYLITLPE

SEQ ID NO: 118538 - protein, 27 aa, Artificial Sequence
  Cyclic GFR-binding peptide
DENKNVVEYQKYVVNNAADIYLISIPS

SEQ ID NO: 118539 - protein, 27 aa, Artificial Sequence
  Cyclic GFR-binding peptide
DENKNVVNSLQEVKPTRGVYYVIPLPE

SEQ ID NO: 118540 - protein, 27 aa, Artificial Sequence
  Cyclic GFR-binding peptide
DENKNVVEYQKYIVNSSDDIFLVSIPS

SEQ ID NO: 118541 - protein, 27 aa, Artificial Sequence
  Cyclic GFR-binding peptide
DENKNVVEYQKYVKPTRGVIFLISIPS

SEQ ID NO: 118542 - protein, 27 aa, Artificial Sequence
  Cyclic GFR-binding peptide
DENKNVVEYQKYVVKDYEDIYLMSIPS

SEQ ID NO: 118543 - protein, 27 aa, Artificial Sequence
  Cyclic GFR-binding peptide
DENKNVVNSLQEVVKENEDYYLMTLPE

SEQ ID NO: 118544 - protein, 27 aa, Artificial Sequence
  Cyclic GFR-binding peptide
DENKNVVNSLQEVVNNASDYYLITLPE

SEQ ID NO: 118545 - protein, 27 aa, Artificial Sequence
  Cyclic GFR-binding peptide
DENKNVVNSLQEVKPKRGVYYVIPLPE

SEQ ID NO: 118546 - protein, 27 aa, Artificial Sequence
  Cyclic GFR-binding peptide
DENKNVVEYQKYIVNSSDDIYLVSIPS

SEQ ID NO: 118547 - protein, 27 aa, Artificial Sequence
  Cyclic GFR-binding peptide
DENKNVVNSLQEVVKENEDYYVMPLPE

SEQ ID NO: 118548 - protein, 27 aa, Artificial Sequence
  Cyclic GFR-binding peptide
DENKNVVEYQKYVVKDYEDIFLMSIPS

SEQ ID NO: 118549 - protein, 27 aa, Artificial Sequence
  Cyclic GFR-binding peptide
DENKNVVNSLQEVVNNASDYYVIPLPE

SEQ ID NO: 118550 - protein, 27 aa, Artificial Sequence
  Cyclic GFR-binding peptide
DENKNVVEYQKYVVNNASDIYLISIPS

SEQ ID NO: 118551 - protein, 27 aa, Artificial Sequence
  Cyclic GFR-binding peptide
DENKNVVNSLQEVKPTRGVYYLITLPE

SEQ ID NO: 118552 - protein, 27 aa, Artificial Sequence
  Cyclic GFR-binding peptide
DENKNVVEYQKYYTVVGKDIYLISIPS

SEQ ID NO: 118553 - protein, 27 aa, Artificial Sequence
  Cyclic GFR-binding peptide
DENKNVVEYQKYIIQQKDNIYLMSIPS

SEQ ID NO: 118554 - protein, 27 aa, Artificial Sequence
  Cyclic GFR-binding peptide
DENKNVVEYQKYTPVGMDDIYLVSIPS

SEQ ID NO: 118555 - protein, 27 aa, Artificial Sequence
  Cyclic GFR-binding peptide
DENKNVVEYQKYIKPTKGIIFLISIPS

SEQ ID NO: 118556 - protein, 27 aa, Artificial Sequence
  Cyclic GFR-binding peptide
DENKNVVEYQKYIVNNSSDIYLVSIPS

SEQ ID NO: 118557 - protein, 27 aa, Artificial Sequence
  Cyclic GFR-binding peptide
DENKNVVNSLQEIKPTKGIYYLITLPE

SEQ ID NO: 118558 - protein, 27 aa, Artificial Sequence
  Cyclic GFR-binding peptide
DENKNVVEYQKYVVNNASDIFLISIPS

SEQ ID NO: 118559 - protein, 27 aa, Artificial Sequence
  Cyclic GFR-binding peptide
DENKNVVEYQKYVKPKRGVIFLISIPS

SEQ ID NO: 118560 - protein, 27 aa, Artificial Sequence
  Cyclic GFR-binding peptide
DENKNVVNSLQEIVNSSDDYYVVPLPE

SEQ ID NO: 118561 - protein, 27 aa, Artificial Sequence
  Cyclic GFR-binding peptide
DENKNVVNSLQEVVKDYEDYYVMPLPE

SEQ ID NO: 118562 - protein, 27 aa, Artificial Sequence
  Cyclic GFR-binding peptide
DENKNVVEYQKYLLVRGNDIYLMSIPS

SEQ ID NO: 118563 - protein, 27 aa, Artificial Sequence
  Cyclic GFR-binding peptide
DENKNVVNSLQEIVNSSDDYYLVTLPE

SEQ ID NO: 118564 - protein, 27 aa, Artificial Sequence
  Cyclic GFR-binding peptide
SPISMLYIDENEKVVYKQYEDENKNVV

SEQ ID NO: 118565 - protein, 27 aa, Artificial Sequence
  Cyclic GFR-binding peptide
EPLTMLYYDEYDKVVEQLSNDENKNVV

SEQ ID NO: 118566 - protein, 27 aa, Artificial Sequence
  Cyclic GFR-binding peptide
SPISMLFIDENEKVVYKQYEDENKNVV

SEQ ID NO: 118567 - protein, 27 aa, Artificial Sequence
  Cyclic GFR-binding peptide
EPLPIVYYIGKTPKIEQLSNDENKNVV

SEQ ID NO: 118568 - protein, 27 aa, Artificial Sequence
  Cyclic GFR-binding peptide
EPLTILYYVGRKPKVEQLSNDENKNVV

SEQ ID NO: 118569 - protein, 27 aa, Artificial Sequence
  Cyclic GFR-binding peptide
SPISILYIDAANNVVYKQYEDENKNVV

SEQ ID NO: 118570 - protein, 27 aa, Artificial Sequence
  Cyclic GFR-binding peptide
EPLPIVYYVGRTPKVEQLSNDENKNVV

SEQ ID NO: 118571 - protein, 27 aa, Artificial Sequence
  Cyclic GFR-binding peptide
SPISVLFIDDSSNVIYKQYEDENKNVV

SEQ ID NO: 118572 - protein, 27 aa, Artificial Sequence
  Cyclic GFR-binding peptide
SPISILFIVGRTPKVYKQYEDENKNVV

SEQ ID NO: 118573 - protein, 27 aa, Artificial Sequence
  Cyclic GFR-binding peptide
SPISMLYIDEYDKVVYKQYEDENKNVV

SEQ ID NO: 118574 - protein, 27 aa, Artificial Sequence
  Cyclic GFR-binding peptide
EPLTMLYYDENEKVVEQLSNDENKNVV

SEQ ID NO: 118575 - protein, 27 aa, Artificial Sequence
  Cyclic GFR-binding peptide
EPLTILYYDSANNVVEQLSNDENKNVV

SEQ ID NO: 118576 - protein, 27 aa, Artificial Sequence
  Cyclic GFR-binding peptide
EPLPIVYYVGRKPKVEQLSNDENKNVV

SEQ ID NO: 118577 - protein, 27 aa, Artificial Sequence
  Cyclic GFR-binding peptide
SPISVLYIDDSSNVIYKQYEDENKNVV

SEQ ID NO: 118578 - protein, 27 aa, Artificial Sequence
  Cyclic GFR-binding peptide
EPLPMVYYDENEKVVEQLSNDENKNVV

SEQ ID NO: 118579 - protein, 27 aa, Artificial Sequence
  Cyclic GFR-binding peptide
SPISMLFIDEYDKVVYKQYEDENKNVV

SEQ ID NO: 118580 - protein, 27 aa, Artificial Sequence
  Cyclic GFR-binding peptide
EPLPIVYYDSANNVVEQLSNDENKNVV

SEQ ID NO: 118581 - protein, 27 aa, Artificial Sequence
  Cyclic GFR-binding peptide
SPISILYIDSANNVVYKQYEDENKNVV

SEQ ID NO: 118582 - protein, 27 aa, Artificial Sequence
  Cyclic GFR-binding peptide
EPLTILYYVGRTPKVEQLSNDENKNVV

SEQ ID NO: 118583 - protein, 27 aa, Artificial Sequence
  Cyclic GFR-binding peptide
SPISILYIDKGVVTYYKQYEDENKNVV

SEQ ID NO: 118584 - protein, 27 aa, Artificial Sequence
  Cyclic GFR-binding peptide
SPISMLYINDKQQIIYKQYEDENKNVV

SEQ ID NO: 118585 - protein, 27 aa, Artificial Sequence
  Cyclic GFR-binding peptide
SPISVLYIDDMGVPTYKQYEDENKNVV

SEQ ID NO: 118586 - protein, 27 aa, Artificial Sequence
  Cyclic GFR-binding peptide
SPISILFIIGKTPKIYKQYEDENKNVV

SEQ ID NO: 118587 - protein, 27 aa, Artificial Sequence
  Cyclic GFR-binding peptide
SPISVLYIDSSNNVIYKQYEDENKNVV

SEQ ID NO: 118588 - protein, 27 aa, Artificial Sequence
  Cyclic GFR-binding peptide
EPLTILYYIGKTPKIEQLSNDENKNVV

SEQ ID NO: 118589 - protein, 27 aa, Artificial Sequence
  Cyclic GFR-binding peptide
SPISILFIDSANNVVYKQYEDENKNVV

SEQ ID NO: 118590 - protein, 27 aa, Artificial Sequence
  Cyclic GFR-binding peptide
SPISILFIVGRKPKVYKQYEDENKNVV

SEQ ID NO: 118591 - protein, 27 aa, Artificial Sequence
  Cyclic GFR-binding peptide
EPLPVVYYDDSSNVIEQLSNDENKNVV

SEQ ID NO: 118592 - protein, 27 aa, Artificial Sequence
  Cyclic GFR-binding peptide
EPLPMVYYDEYDKVVEQLSNDENKNVV

SEQ ID NO: 118593 - protein, 27 aa, Artificial Sequence
  Cyclic GFR-binding peptide
SPISMLYIDNGRVLLYKQYEDENKNVV

SEQ ID NO: 118594 - protein, 27 aa, Artificial Sequence
  Cyclic GFR-binding peptide
EPLTVLYYDDSSNVIEQLSNDENKNVV

SEQ ID NO: 118595 - protein, 27 aa, Artificial Sequence
  Cyclic GFR-binding peptide
DENKNVVPYVKLVVKENEDFFLMSLSS

SEQ ID NO: 118596 - protein, 29 aa, Artificial Sequence
  Cyclic GFR-binding peptide
DENKNVVPYVKLHQGQHPKIRFFLMSLSS

SEQ ID NO: 118597 - protein, 27 aa, Artificial Sequence
  Cyclic GFR-binding peptide
DENKNVVPYVKLVVNKNEDFFLISLSS

SEQ ID NO: 118598 - protein, 27 aa, Artificial Sequence
  Cyclic GFR-binding peptide
DENKNVVPYVKLVKPKRGVLFFISLSS

SEQ ID NO: 118599 - protein, 27 aa, Artificial Sequence
  Cyclic GFR-binding peptide
DENKNVVPYVKLVVNNAADFFLISLSS

SEQ ID NO: 118600 - protein, 27 aa, Artificial Sequence
  Cyclic GFR-binding peptide
DENKNVVPYVKLIVNNSSDFFLVSLSS

SEQ ID NO: 118601 - protein, 27 aa, Artificial Sequence
  Cyclic GFR-binding peptide
DENKNVVPYVKLIIQQKDNFFLMSLSS

SEQ ID NO: 118602 - protein, 27 aa, Artificial Sequence
  Cyclic GFR-binding peptide
DENKNVVPYVKLLLVRGNDFFLMSLSS

SEQ ID NO: 118603 - protein, 27 aa, Artificial Sequence
  Cyclic GFR-binding peptide
DENKNVVPYVKLVKPTRGVLFFISLSS

SEQ ID NO: 118604 - protein, 27 aa, Artificial Sequence
  Cyclic GFR-binding peptide
DENKNVVPYVKLVVNNASDFFLISLSS

SEQ ID NO: 118605 - protein, 27 aa, Artificial Sequence
  Cyclic GFR-binding peptide
DENKNVVPYVKLIKPTKGILFFISLSS

SEQ ID NO: 118606 - protein, 27 aa, Artificial Sequence
  Cyclic GFR-binding peptide
DENKNVVPYVKLTPVGMDDFFLVSLSS

SEQ ID NO: 118607 - protein, 27 aa, Artificial Sequence
  Cyclic GFR-binding peptide
DENKNVVPYVKLYTVVGKDFFLISLSS

SEQ ID NO: 118608 - protein, 27 aa, Artificial Sequence
  Cyclic GFR-binding peptide
DENKNVVPYVKLVVKDYEDFFLMSLSS

SEQ ID NO: 118609 - protein, 27 aa, Artificial Sequence
  Cyclic GFR-binding peptide
DENKNVVPYVKLIVNSSDDFFLVSLSS

SEQ ID NO: 118610 - protein, 29 aa, Artificial Sequence
  Cyclic GFR-binding peptide
DENKNVVPYVKLLKPKKRVYEFFLVSLSS

SEQ ID NO: 118611 - protein, 27 aa, Artificial Sequence
  Cyclic GFR-binding peptide
SSLSMLFFDENEKVVLKVYPDENKNVV

SEQ ID NO: 118612 - protein, 29 aa, Artificial Sequence
  Cyclic GFR-binding peptide
SSLSMLFFRIKPHQGQHLKVYPDENKNVV

SEQ ID NO: 118613 - protein, 27 aa, Artificial Sequence
  Cyclic GFR-binding peptide
SSLSILFFDENKNVVLKVYPDENKNVV

SEQ ID NO: 118614 - protein, 27 aa, Artificial Sequence
  Cyclic GFR-binding peptide
SSLSILFFVGRKPKVLKVYPDENKNVV

SEQ ID NO: 118615 - protein, 27 aa, Artificial Sequence
  Cyclic GFR-binding peptide
SSLSILFFDAANNVVLKVYPDENKNVV

SEQ ID NO: 118616 - protein, 27 aa, Artificial Sequence
  Cyclic GFR-binding peptide
SSLSVLFFDSSNNVILKVYPDENKNVV

SEQ ID NO: 118617 - protein, 27 aa, Artificial Sequence
  Cyclic GFR-binding peptide
SSLSMLFFNDKQQIILKVYPDENKNVV

SEQ ID NO: 118618 - protein, 27 aa, Artificial Sequence
  Cyclic GFR-binding peptide
SSLSMLFFDNGRVLLLKVYPDENKNVV

SEQ ID NO: 118619 - protein, 27 aa, Artificial Sequence
  Cyclic GFR-binding peptide
SSLSILFFVGRTPKVLKVYPDENKNVV

SEQ ID NO: 118620 - protein, 27 aa, Artificial Sequence
  Cyclic GFR-binding peptide
SSLSILFFDSANNVVLKVYPDENKNVV

SEQ ID NO: 118621 - protein, 27 aa, Artificial Sequence
  Cyclic GFR-binding peptide
SSLSILFFIGKTPKILKVYPDENKNVV

SEQ ID NO: 118622 - protein, 27 aa, Artificial Sequence
  Cyclic GFR-binding peptide
SSLSVLFFDDMGVPTLKVYPDENKNVV

SEQ ID NO: 118623 - protein, 27 aa, Artificial Sequence
  Cyclic GFR-binding peptide
SSLSILFFDKGVVTYLKVYPDENKNVV

SEQ ID NO: 118624 - protein, 27 aa, Artificial Sequence
  Cyclic GFR-binding peptide
SSLSMLFFDEYDKVVLKVYPDENKNVV

SEQ ID NO: 118625 - protein, 27 aa, Artificial Sequence
  Cyclic GFR-binding peptide
SSLSVLFFDDSSNVILKVYPDENKNVV

SEQ ID NO: 118626 - protein, 29 aa, Artificial Sequence
  Cyclic GFR-binding peptide
SSLSVLFFEYVRKKPKLLKVYPDENKNVV

SEQ ID NO: 118627 - protein, 27 aa, Artificial Sequence
  Cyclic GFR-binding peptide
DENKNVVNSLQEVVKDYEDYYLMTLPE

SEQ ID NO: 118628 - protein, 27 aa, Artificial Sequence
  Cyclic GFR-binding peptide
DENKNVVNSLQEIKPTKGIYYVIPLPE

SEQ ID NO: 118629 - protein, 27 aa, Artificial Sequence
  Cyclic GFR-binding peptide
DENKNVVSMEGIIVNSSDDMIQVTINS

SEQ ID NO: 118630 - protein, 27 aa, Artificial Sequence
  Cyclic GFR-binding peptide
DENKNVVNSLQEVKPKRGVYYLITLPE

SEQ ID NO: 118631 - protein, 27 aa, Artificial Sequence
  Cyclic GFR-binding peptide
DENKNVVNSLQEVKPTRGVYYVIPLPE

SEQ ID NO: 118632 - protein, 27 aa, Artificial Sequence
  Cyclic GFR-binding peptide
DENKNVVVTAKKVVKENEDIKRMQVPR

SEQ ID NO: 118633 - protein, 27 aa, Artificial Sequence
  Cyclic GFR-binding peptide
DENKNVVNSLQEIVNSSDDYYVVPLPE

SEQ ID NO: 118634 - protein, 29 aa, Artificial Sequence
  Cyclic GFR-binding peptide
DENKNVVSMEGIHQGQHPKIRMIQMTINS

SEQ ID NO: 118635 - protein, 29 aa, Artificial Sequence
  Cyclic GFR-binding peptide
DENKNVVVTAKKLKPKKRVYEIKRVQVPR

SEQ ID NO: 118636 - protein, 27 aa, Artificial Sequence
  Cyclic GFR-binding peptide
DENKNVVSMEGIVVKDYEDMIQMTINS

SEQ ID NO: 118637 - protein, 29 aa, Artificial Sequence
  Cyclic GFR-binding peptide
DENKNVVVQVEKHQGQHPKIRVKAMKVSR

SEQ ID NO: 118638 - protein, 27 aa, Artificial Sequence
  Cyclic GFR-binding peptide
DENKNVVVTAKKIKPTKGIIKRIQVPR

SEQ ID NO: 118639 - protein, 27 aa, Artificial Sequence
  Cyclic GFR-binding peptide
DENKNVVSMEGIVKPTRGVMIQITINS

SEQ ID NO: 118640 - protein, 29 aa, Artificial Sequence
  Cyclic GFR-binding peptide
DENKNVVNSLQEFIPKKRVIEYYVVPLPE

SEQ ID NO: 118641 - protein, 27 aa, Artificial Sequence
  Cyclic GFR-binding peptide
DENKNVVVQVEKVKPKRGVVKAIKVSR

SEQ ID NO: 118642 - protein, 27 aa, Artificial Sequence
  Cyclic GFR-binding peptide
DENKNVVVQVEKVVKENEDVKAMKVSR

SEQ ID NO: 118643 - protein, 27 aa, Artificial Sequence
  Cyclic GFR-binding peptide
DENKNVVNSLQEVVKENEDYYVMPLPE

SEQ ID NO: 118644 - protein, 27 aa, Artificial Sequence
  Cyclic GFR-binding peptide
DENKNVVVTAKKIVNSSDDIKRVQVPR

SEQ ID NO: 118645 - protein, 27 aa, Artificial Sequence
  Cyclic GFR-binding peptide
DENKNVVVQVEKIKPTKGIVKAIKVSR

SEQ ID NO: 118646 - protein, 27 aa, Artificial Sequence
  Cyclic GFR-binding peptide
DENKNVVNSLQEIKPTKGIYYLITLPE

SEQ ID NO: 118647 - protein, 29 aa, Artificial Sequence
  Cyclic GFR-binding peptide
DENKNVVNSLQEFIPKKRVIEYYLVTLPE

SEQ ID NO: 118648 - protein, 27 aa, Artificial Sequence
  Cyclic GFR-binding peptide
DENKNVVVQVEKIVNSSDDVKAVKVSR

SEQ ID NO: 118649 - protein, 27 aa, Artificial Sequence
  Cyclic GFR-binding peptide
DENKNVVNSLQEIVNSSDDYYLVTLPE

SEQ ID NO: 118650 - protein, 29 aa, Artificial Sequence
  Cyclic GFR-binding peptide
DENKNVVVQVEKLKPKKRVYEVKAVKVSR

SEQ ID NO: 118651 - protein, 29 aa, Artificial Sequence
  Cyclic GFR-binding peptide
DENKNVVVQVEKFIPKKRVIEVKAVKVSR

SEQ ID NO: 118652 - protein, 29 aa, Artificial Sequence
  Cyclic GFR-binding peptide
DENKNVVVTAKKHQGQHPKIRIKRMQVPR

SEQ ID NO: 118653 - protein, 27 aa, Artificial Sequence
  Cyclic GFR-binding peptide
DENKNVVNSLQEVVKENEDYYLMTLPE

SEQ ID NO: 118654 - protein, 29 aa, Artificial Sequence
  Cyclic GFR-binding peptide
DENKNVVSMEGIFIPKKRVIEMIQVTINS

SEQ ID NO: 118655 - protein, 27 aa, Artificial Sequence
  Cyclic GFR-binding peptide
DENKNVVNSLQEVKPKRGVYYVIPLPE

SEQ ID NO: 118656 - protein, 27 aa, Artificial Sequence
  Cyclic GFR-binding peptide
DENKNVVVTAKKVKPKRGVIKRIQVPR

SEQ ID NO: 118657 - protein, 27 aa, Artificial Sequence
  Cyclic GFR-binding peptide
DENKNVVNSLQEVKPTRGVYYLITLPE

SEQ ID NO: 118658 - protein, 27 aa, Artificial Sequence
  Cyclic GFR-binding peptide
DENKNVVVQVEKVKPTRGVVKAIKVSR

SEQ ID NO: 118659 - protein, 29 aa, Artificial Sequence
  Cyclic GFR-binding peptide
DENKNVVSMEGILKPKKRVYEMIQVTINS

SEQ ID NO: 118660 - protein, 27 aa, Artificial Sequence
  Cyclic GFR-binding peptide
DENKNVVNSLQEVVKDYEDYYVMPLPE

SEQ ID NO: 118661 - protein, 27 aa, Artificial Sequence
  Cyclic GFR-binding peptide
DENKNVVVTAKKVKPTRGVIKRIQVPR

SEQ ID NO: 118662 - protein, 29 aa, Artificial Sequence
  Cyclic GFR-binding peptide
DENKNVVNSLQELKPKKRVYEYYLVTLPE

SEQ ID NO: 118663 - protein, 27 aa, Artificial Sequence
  Cyclic GFR-binding peptide
DENKNVVSMEGIVKPKRGVMIQITINS

SEQ ID NO: 118664 - protein, 27 aa, Artificial Sequence
  Cyclic GFR-binding peptide
DENKNVVSMEGIVVKENEDMIQMTINS

SEQ ID NO: 118665 - protein, 27 aa, Artificial Sequence
  Cyclic GFR-binding peptide
DENKNVVSMEGIIKPTKGIMIQITINS

SEQ ID NO: 118666 - protein, 29 aa, Artificial Sequence
  Cyclic GFR-binding peptide
DENKNVVNSLQEHQGQHPKIRYYLMTLPE

SEQ ID NO: 118667 - protein, 27 aa, Artificial Sequence
  Cyclic GFR-binding peptide
DENKNVVVTAKKVVKDYEDIKRMQVPR

SEQ ID NO: 118668 - protein, 29 aa, Artificial Sequence
  Cyclic GFR-binding peptide
DENKNVVNSLQEHQGQHPKIRYYVMPLPE

SEQ ID NO: 118669 - protein, 29 aa, Artificial Sequence
  Cyclic GFR-binding peptide
DENKNVVNSLQELKPKKRVYEYYVVPLPE

SEQ ID NO: 118670 - protein, 29 aa, Artificial Sequence
  Cyclic GFR-binding peptide
DENKNVVVTAKKFIPKKRVIEIKRVQVPR

SEQ ID NO: 118671 - protein, 27 aa, Artificial Sequence
  Cyclic GFR-binding peptide
DENKNVVVQVEKVVKDYEDVKAMKVSR

SEQ ID NO: 118672 - protein, 27 aa, Artificial Sequence
  Cyclic GFR-binding peptide
EPLTMLYYDEYDKVVEQLSNDENKNVV

SEQ ID NO: 118673 - protein, 27 aa, Artificial Sequence
  Cyclic GFR-binding peptide
EPLPIVYYIGKTPKIEQLSNDENKNVV

SEQ ID NO: 118674 - protein, 27 aa, Artificial Sequence
  Cyclic GFR-binding peptide
SNITVQIMDDSSNVIIGEMSDENKNVV

SEQ ID NO: 118675 - protein, 27 aa, Artificial Sequence
  Cyclic GFR-binding peptide
EPLTILYYVGRKPKVEQLSNDENKNVV

SEQ ID NO: 118676 - protein, 27 aa, Artificial Sequence
  Cyclic GFR-binding peptide
EPLPIVYYVGRTPKVEQLSNDENKNVV

SEQ ID NO: 118677 - protein, 27 aa, Artificial Sequence
  Cyclic GFR-binding peptide
RPVQMRKIDENEKVVKKATVDENKNVV

SEQ ID NO: 118678 - protein, 27 aa, Artificial Sequence
  Cyclic GFR-binding peptide
EPLPVVYYDDSSNVIEQLSNDENKNVV

SEQ ID NO: 118679 - protein, 29 aa, Artificial Sequence
  Cyclic GFR-binding peptide
SNITMQIMRIKPHQGQHIGEMSDENKNVV

SEQ ID NO: 118680 - protein, 29 aa, Artificial Sequence
  Cyclic GFR-binding peptide
RPVQVRKIEYVRKKPKLKKATVDENKNVV

SEQ ID NO: 118681 - protein, 27 aa, Artificial Sequence
  Cyclic GFR-binding peptide
SNITMQIMDEYDKVVIGEMSDENKNVV

SEQ ID NO: 118682 - protein, 29 aa, Artificial Sequence
  Cyclic GFR-binding peptide
RSVKMAKVRIKPHQGQHKEVQVDENKNVV

SEQ ID NO: 118683 - protein, 27 aa, Artificial Sequence
  Cyclic GFR-binding peptide
RPVQIRKIIGKTPKIKKATVDENKNVV

SEQ ID NO: 118684 - protein, 27 aa, Artificial Sequence
  Cyclic GFR-binding peptide
SNITIQIMVGRTPKVIGEMSDENKNVV

SEQ ID NO: 118685 - protein, 29 aa, Artificial Sequence
  Cyclic GFR-binding peptide
EPLPVVYYEIVRKKPIFEQLSNDENKNVV

SEQ ID NO: 118686 - protein, 27 aa, Artificial Sequence
  Cyclic GFR-binding peptide
RSVKIAKVVGRKPKVKEVQVDENKNVV

SEQ ID NO: 118687 - protein, 27 aa, Artificial Sequence
  Cyclic GFR-binding peptide
RSVKMAKVDENEKVVKEVQVDENKNVV

SEQ ID NO: 118688 - protein, 27 aa, Artificial Sequence
  Cyclic GFR-binding peptide
EPLPMVYYDENEKVVEQLSNDENKNVV

SEQ ID NO: 118689 - protein, 27 aa, Artificial Sequence
  Cyclic GFR-binding peptide
RPVQVRKIDDSSNVIKKATVDENKNVV

SEQ ID NO: 118690 - protein, 27 aa, Artificial Sequence
  Cyclic GFR-binding peptide
RSVKIAKVIGKTPKIKEVQVDENKNVV

SEQ ID NO: 118691 - protein, 27 aa, Artificial Sequence
  Cyclic GFR-binding peptide
EPLTILYYIGKTPKIEQLSNDENKNVV

SEQ ID NO: 118692 - protein, 29 aa, Artificial Sequence
  Cyclic GFR-binding peptide
EPLTVLYYEIVRKKPIFEQLSNDENKNVV

SEQ ID NO: 118693 - protein, 27 aa, Artificial Sequence
  Cyclic GFR-binding peptide
RSVKVAKVDDSSNVIKEVQVDENKNVV

SEQ ID NO: 118694 - protein, 27 aa, Artificial Sequence
  Cyclic GFR-binding peptide
EPLTVLYYDDSSNVIEQLSNDENKNVV

SEQ ID NO: 118695 - protein, 29 aa, Artificial Sequence
  Cyclic GFR-binding peptide
RSVKVAKVEYVRKKPKLKEVQVDENKNVV

SEQ ID NO: 118696 - protein, 29 aa, Artificial Sequence
  Cyclic GFR-binding peptide
RSVKVAKVEIVRKKPIFKEVQVDENKNVV

SEQ ID NO: 118697 - protein, 29 aa, Artificial Sequence
  Cyclic GFR-binding peptide
RPVQMRKIRIKPHQGQHKKATVDENKNVV

SEQ ID NO: 118698 - protein, 27 aa, Artificial Sequence
  Cyclic GFR-binding peptide
EPLTMLYYDENEKVVEQLSNDENKNVV

SEQ ID NO: 118699 - protein, 29 aa, Artificial Sequence
  Cyclic GFR-binding peptide
SNITVQIMEIVRKKPIFIGEMSDENKNVV

SEQ ID NO: 118700 - protein, 27 aa, Artificial Sequence
  Cyclic GFR-binding peptide
EPLPIVYYVGRKPKVEQLSNDENKNVV

SEQ ID NO: 118701 - protein, 27 aa, Artificial Sequence
  Cyclic GFR-binding peptide
RPVQIRKIVGRKPKVKKATVDENKNVV

SEQ ID NO: 118702 - protein, 27 aa, Artificial Sequence
  Cyclic GFR-binding peptide
EPLTILYYVGRTPKVEQLSNDENKNVV

SEQ ID NO: 118703 - protein, 27 aa, Artificial Sequence
  Cyclic GFR-binding peptide
RSVKIAKVVGRTPKVKEVQVDENKNVV

SEQ ID NO: 118704 - protein, 29 aa, Artificial Sequence
  Cyclic GFR-binding peptide
SNITVQIMEYVRKKPKLIGEMSDENKNVV

SEQ ID NO: 118705 - protein, 27 aa, Artificial Sequence
  Cyclic GFR-binding peptide
EPLPMVYYDEYDKVVEQLSNDENKNVV

SEQ ID NO: 118706 - protein, 27 aa, Artificial Sequence
  Cyclic GFR-binding peptide
RPVQIRKIVGRTPKVKKATVDENKNVV

SEQ ID NO: 118707 - protein, 29 aa, Artificial Sequence
  Cyclic GFR-binding peptide
EPLTVLYYEYVRKKPKLEQLSNDENKNVV

SEQ ID NO: 118708 - protein, 27 aa, Artificial Sequence
  Cyclic GFR-binding peptide
SNITIQIMVGRKPKVIGEMSDENKNVV

SEQ ID NO: 118709 - protein, 27 aa, Artificial Sequence
  Cyclic GFR-binding peptide
SNITMQIMDENEKVVIGEMSDENKNVV

SEQ ID NO: 118710 - protein, 27 aa, Artificial Sequence
  Cyclic GFR-binding peptide
SNITIQIMIGKTPKIIGEMSDENKNVV

SEQ ID NO: 118711 - protein, 29 aa, Artificial Sequence
  Cyclic GFR-binding peptide
EPLTMLYYRIKPHQGQHEQLSNDENKNVV

SEQ ID NO: 118712 - protein, 27 aa, Artificial Sequence
  Cyclic GFR-binding peptide
RPVQMRKIDEYDKVVKKATVDENKNVV

SEQ ID NO: 118713 - protein, 29 aa, Artificial Sequence
  Cyclic GFR-binding peptide
EPLPMVYYRIKPHQGQHEQLSNDENKNVV

SEQ ID NO: 118714 - protein, 29 aa, Artificial Sequence
  Cyclic GFR-binding peptide
EPLPVVYYEYVRKKPKLEQLSNDENKNVV

SEQ ID NO: 118715 - protein, 29 aa, Artificial Sequence
  Cyclic GFR-binding peptide
RPVQVRKIEIVRKKPIFKKATVDENKNVV

SEQ ID NO: 118716 - protein, 27 aa, Artificial Sequence
  Cyclic GFR-binding peptide
RSVKMAKVDEYDKVVKEVQVDENKNVV

SEQ ID NO: 118717 - protein, 27 aa, Artificial Sequence
  Cyclic GFR-binding peptide
DENKNVVRYKKLIIQQKDNFYLMSIAN

SEQ ID NO: 118718 - protein, 27 aa, Artificial Sequence
  Cyclic GFR-binding peptide
DENKNVVRYKKLIVNNSSDFYLVSIAN

SEQ ID NO: 118719 - protein, 27 aa, Artificial Sequence
  Cyclic GFR-binding peptide
DENKNVVRYKKLYTVVGKDFYLISIAN

SEQ ID NO: 118720 - protein, 27 aa, Artificial Sequence
  Cyclic GFR-binding peptide
DENKNVVRYKKLIVNSSDDFYLVSIAN

SEQ ID NO: 118721 - protein, 27 aa, Artificial Sequence
  Cyclic GFR-binding peptide
DENKNVVRYKKLVVKDYEDFYLMSIAN

SEQ ID NO: 118722 - protein, 27 aa, Artificial Sequence
  Cyclic GFR-binding peptide
DENKNVVRYKKLLLVRGNDFYLMSIAN

SEQ ID NO: 118723 - protein, 27 aa, Artificial Sequence
  Cyclic GFR-binding peptide
DENKNVVRYKKLVVKENEDFYLMSIAN

SEQ ID NO: 118724 - protein, 27 aa, Artificial Sequence
  Cyclic GFR-binding peptide
DENKNVVRYKKLVVNNAADFYLISIAN

SEQ ID NO: 118725 - protein, 27 aa, Artificial Sequence
  Cyclic GFR-binding peptide
DENKNVVRYKKLTPVGMDDFYLVSIAN

SEQ ID NO: 118726 - protein, 27 aa, Artificial Sequence
  Cyclic GFR-binding peptide
DENKNVVRYKKLVVNNASDFYLISIAN

SEQ ID NO: 118727 - protein, 27 aa, Artificial Sequence
  Cyclic GFR-binding peptide
NAISMLYFNDKQQIILKKYRDENKNVV

SEQ ID NO: 118728 - protein, 27 aa, Artificial Sequence
  Cyclic GFR-binding peptide
NAISVLYFDSSNNVILKKYRDENKNVV

SEQ ID NO: 118729 - protein, 27 aa, Artificial Sequence
  Cyclic GFR-binding peptide
NAISILYFDKGVVTYLKKYRDENKNVV

SEQ ID NO: 118730 - protein, 27 aa, Artificial Sequence
  Cyclic GFR-binding peptide
NAISVLYFDDSSNVILKKYRDENKNVV

SEQ ID NO: 118731 - protein, 27 aa, Artificial Sequence
  Cyclic GFR-binding peptide
NAISMLYFDEYDKVVLKKYRDENKNVV

SEQ ID NO: 118732 - protein, 27 aa, Artificial Sequence
  Cyclic GFR-binding peptide
NAISMLYFDNGRVLLLKKYRDENKNVV

SEQ ID NO: 118733 - protein, 27 aa, Artificial Sequence
  Cyclic GFR-binding peptide
NAISMLYFDENEKVVLKKYRDENKNVV

SEQ ID NO: 118734 - protein, 27 aa, Artificial Sequence
  Cyclic GFR-binding peptide
NAISILYFDAANNVVLKKYRDENKNVV

SEQ ID NO: 118735 - protein, 27 aa, Artificial Sequence
  Cyclic GFR-binding peptide
NAISVLYFDDMGVPTLKKYRDENKNVV

SEQ ID NO: 118736 - protein, 27 aa, Artificial Sequence
  Cyclic GFR-binding peptide
NAISILYFDSANNVVLKKYRDENKNVV

SEQ ID NO: 118737 - protein, 27 aa, Artificial Sequence
  Cyclic GFR-binding peptide
DENKNVVEYKFKVKPTRGVLYLISIPE

SEQ ID NO: 118738 - protein, 27 aa, Artificial Sequence
  Cyclic GFR-binding peptide
DENKNVVYHYKLVVKDYEDKYLMSIPS

SEQ ID NO: 118739 - protein, 27 aa, Artificial Sequence
  Cyclic GFR-binding peptide
DENKNVVEYKFKTPVGMDDLYLVSIPE

SEQ ID NO: 118740 - protein, 27 aa, Artificial Sequence
  Cyclic GFR-binding peptide
DENKNVVRYKKLVVKDYEDFYLMSIAN

SEQ ID NO: 118741 - protein, 27 aa, Artificial Sequence
  Cyclic GFR-binding peptide
DENKNVVRHKRLVKPKRGVYYLISTAS

SEQ ID NO: 118742 - protein, 27 aa, Artificial Sequence
  Cyclic GFR-binding peptide
DENKNVVYHYKLVKPKRGVKYLISIPS

SEQ ID NO: 118743 - protein, 27 aa, Artificial Sequence
  Cyclic GFR-binding peptide
DENKNVVEYKFKIKPTKGILYLISIPE

SEQ ID NO: 118744 - protein, 27 aa, Artificial Sequence
  Cyclic GFR-binding peptide
DENKNVVEYKFKVVNKNEDLYLISIPE

SEQ ID NO: 118745 - protein, 27 aa, Artificial Sequence
  Cyclic GFR-binding peptide
DENKNVVPIKGYVKPTRGVFYLINIPS

SEQ ID NO: 118746 - protein, 27 aa, Artificial Sequence
  Cyclic GFR-binding peptide
DENKNVVPIKGYVVKENEDFYLMNIPS

SEQ ID NO: 118747 - protein, 27 aa, Artificial Sequence
  Cyclic GFR-binding peptide
DENKNVVYHYKLYTVVGKDKYLISIPS

SEQ ID NO: 118748 - protein, 27 aa, Artificial Sequence
  Cyclic GFR-binding peptide
DENKNVVEYKFKLLVRGNDLYLMSIPE

SEQ ID NO: 118749 - protein, 27 aa, Artificial Sequence
  Cyclic GFR-binding peptide
DENKNVVRYKKLVKPKRGVFYLISIAN

SEQ ID NO: 118750 - protein, 27 aa, Artificial Sequence
  Cyclic GFR-binding peptide
DENKNVVPIKGYTPVGMDDFYLVNIPS

SEQ ID NO: 118751 - protein, 27 aa, Artificial Sequence
  Cyclic GFR-binding peptide
DENKNVVYHYKLVVNKNEDKYLISIPS

SEQ ID NO: 118752 - protein, 27 aa, Artificial Sequence
  Cyclic GFR-binding peptide
DENKNVVYHYKLIVNSSDDKYLVSIPS

SEQ ID NO: 118753 - protein, 27 aa, Artificial Sequence
  Cyclic GFR-binding peptide
DENKNVVPIKGYIVNSSDDFYLVNIPS

SEQ ID NO: 118754 - protein, 27 aa, Artificial Sequence
  Cyclic GFR-binding peptide
DENKNVVRYKKLYTVVGKDFYLISIAN

SEQ ID NO: 118755 - protein, 27 aa, Artificial Sequence
  Cyclic GFR-binding peptide
DENKNVVRHKRLLLVRGNDYYLMSTAS

SEQ ID NO: 118756 - protein, 27 aa, Artificial Sequence
  Cyclic GFR-binding peptide
DENKNVVYHYKLLLVRGNDKYLMSIPS

SEQ ID NO: 118757 - protein, 27 aa, Artificial Sequence
  Cyclic GFR-binding peptide
DENKNVVRYKKLIVNSSDDFYLVSIAN

SEQ ID NO: 118758 - protein, 27 aa, Artificial Sequence
  Cyclic GFR-binding peptide
DENKNVVRHKRLVVNKNEDYYLISTAS

SEQ ID NO: 118759 - protein, 27 aa, Artificial Sequence
  Cyclic GFR-binding peptide
DENKNVVRHKRLIKPTKGIYYLISTAS

SEQ ID NO: 118760 - protein, 27 aa, Artificial Sequence
  Cyclic GFR-binding peptide
DENKNVVPIKGYYTVVGKDFYLINIPS

SEQ ID NO: 118761 - protein, 27 aa, Artificial Sequence
  Cyclic GFR-binding peptide
DENKNVVYHYKLTPVGMDDKYLVSIPS

SEQ ID NO: 118762 - protein, 27 aa, Artificial Sequence
  Cyclic GFR-binding peptide
DENKNVVRHKRLIVNNSSDYYLVSTAS

SEQ ID NO: 118763 - protein, 27 aa, Artificial Sequence
  Cyclic GFR-binding peptide
DENKNVVRYKKLLLVRGNDFYLMSIAN

SEQ ID NO: 118764 - protein, 27 aa, Artificial Sequence
  Cyclic GFR-binding peptide
DENKNVVYHYKLVKPTRGVKYLISIPS

SEQ ID NO: 118765 - protein, 27 aa, Artificial Sequence
  Cyclic GFR-binding peptide
DENKNVVRHKRLIVNSSDDYYLVSTAS

SEQ ID NO: 118766 - protein, 27 aa, Artificial Sequence
  Cyclic GFR-binding peptide
DENKNVVPIKGYLLVRGNDFYLMNIPS

SEQ ID NO: 118767 - protein, 27 aa, Artificial Sequence
  Cyclic GFR-binding peptide
DENKNVVRYKKLVVNKNEDFYLISIAN

SEQ ID NO: 118768 - protein, 27 aa, Artificial Sequence
  Cyclic GFR-binding peptide
DENKNVVEYKFKVVKDYEDLYLMSIPE

SEQ ID NO: 118769 - protein, 27 aa, Artificial Sequence
  Cyclic GFR-binding peptide
DENKNVVPIKGYVVNKNEDFYLINIPS

SEQ ID NO: 118770 - protein, 27 aa, Artificial Sequence
  Cyclic GFR-binding peptide
DENKNVVPIKGYIKPTKGIFYLINIPS

SEQ ID NO: 118771 - protein, 27 aa, Artificial Sequence
  Cyclic GFR-binding peptide
DENKNVVEYKFKVVNNAADLYLISIPE

SEQ ID NO: 118772 - protein, 27 aa, Artificial Sequence
  Cyclic GFR-binding peptide
DENKNVVRHKRLYTVVGKDYYLISTAS

SEQ ID NO: 118773 - protein, 27 aa, Artificial Sequence
  Cyclic GFR-binding peptide
DENKNVVRYKKLIKPTKGIFYLISIAN

SEQ ID NO: 118774 - protein, 27 aa, Artificial Sequence
  Cyclic GFR-binding peptide
DENKNVVPIKGYVVKDYEDFYLMNIPS

SEQ ID NO: 118775 - protein, 27 aa, Artificial Sequence
  Cyclic GFR-binding peptide
DENKNVVEYKFKVVNNASDLYLISIPE

SEQ ID NO: 118776 - protein, 27 aa, Artificial Sequence
  Cyclic GFR-binding peptide
DENKNVVRYKKLVKPTRGVFYLISIAN

SEQ ID NO: 118777 - protein, 27 aa, Artificial Sequence
  Cyclic GFR-binding peptide
DENKNVVRHKRLVVKENEDYYLMSTAS

SEQ ID NO: 118778 - protein, 27 aa, Artificial Sequence
  Cyclic GFR-binding peptide
DENKNVVYHYKLIKPTKGIKYLISIPS

SEQ ID NO: 118779 - protein, 27 aa, Artificial Sequence
  Cyclic GFR-binding peptide
DENKNVVYHYKLVVKENEDKYLMSIPS

SEQ ID NO: 118780 - protein, 27 aa, Artificial Sequence
  Cyclic GFR-binding peptide
DENKNVVRHKRLIIQQKDNYYLMSTAS

SEQ ID NO: 118781 - protein, 27 aa, Artificial Sequence
  Cyclic GFR-binding peptide
DENKNVVRYKKLVVKENEDFYLMSIAN

SEQ ID NO: 118782 - protein, 27 aa, Artificial Sequence
  Cyclic GFR-binding peptide
DENKNVVRYKKLVVNNAADFYLISIAN

SEQ ID NO: 118783 - protein, 27 aa, Artificial Sequence
  Cyclic GFR-binding peptide
DENKNVVEYKFKIIQQKDNLYLMSIPE

SEQ ID NO: 118784 - protein, 27 aa, Artificial Sequence
  Cyclic GFR-binding peptide
DENKNVVRYKKLTPVGMDDFYLVSIAN

SEQ ID NO: 118785 - protein, 27 aa, Artificial Sequence
  Cyclic GFR-binding peptide
DENKNVVYHYKLVVNNAADKYLISIPS

SEQ ID NO: 118786 - protein, 27 aa, Artificial Sequence
  Cyclic GFR-binding peptide
DENKNVVPIKGYIVNNSSDFYLVNIPS

SEQ ID NO: 118787 - protein, 27 aa, Artificial Sequence
  Cyclic GFR-binding peptide
DENKNVVPIKGYVKPKRGVFYLINIPS

SEQ ID NO: 118788 - protein, 27 aa, Artificial Sequence
  Cyclic GFR-binding peptide
DENKNVVRYKKLIIQQKDNFYLMSIAN

SEQ ID NO: 118789 - protein, 27 aa, Artificial Sequence
  Cyclic GFR-binding peptide
DENKNVVPIKGYIIQQKDNFYLMNIPS

SEQ ID NO: 118790 - protein, 27 aa, Artificial Sequence
  Cyclic GFR-binding peptide
DENKNVVRYKKLIVNNSSDFYLVSIAN

SEQ ID NO: 118791 - protein, 27 aa, Artificial Sequence
  Cyclic GFR-binding peptide
DENKNVVPIKGYVVNNAADFYLINIPS

SEQ ID NO: 118792 - protein, 27 aa, Artificial Sequence
  Cyclic GFR-binding peptide
DENKNVVRHKRLVKPTRGVYYLISTAS

SEQ ID NO: 118793 - protein, 27 aa, Artificial Sequence
  Cyclic GFR-binding peptide
DENKNVVEYKFKIVNNSSDLYLVSIPE

SEQ ID NO: 118794 - protein, 27 aa, Artificial Sequence
  Cyclic GFR-binding peptide
DENKNVVRHKRLVVNNASDYYLISTAS

SEQ ID NO: 118795 - protein, 27 aa, Artificial Sequence
  Cyclic GFR-binding peptide
DENKNVVRHKRLTPVGMDDYYLVSTAS

SEQ ID NO: 118796 - protein, 27 aa, Artificial Sequence
  Cyclic GFR-binding peptide
DENKNVVYHYKLIVNNSSDKYLVSIPS

SEQ ID NO: 118797 - protein, 27 aa, Artificial Sequence
  Cyclic GFR-binding peptide
DENKNVVYHYKLVVNNASDKYLISIPS

SEQ ID NO: 118798 - protein, 27 aa, Artificial Sequence
  Cyclic GFR-binding peptide
DENKNVVEYKFKIVNSSDDLYLVSIPE

SEQ ID NO: 118799 - protein, 27 aa, Artificial Sequence
  Cyclic GFR-binding peptide
DENKNVVEYKFKVKPKRGVLYLISIPE

SEQ ID NO: 118800 - protein, 27 aa, Artificial Sequence
  Cyclic GFR-binding peptide
DENKNVVRHKRLVVKDYEDYYLMSTAS

SEQ ID NO: 118801 - protein, 27 aa, Artificial Sequence
  Cyclic GFR-binding peptide
DENKNVVEYKFKVVKENEDLYLMSIPE

SEQ ID NO: 118802 - protein, 27 aa, Artificial Sequence
  Cyclic GFR-binding peptide
DENKNVVEYKFKYTVVGKDLYLISIPE

SEQ ID NO: 118803 - protein, 27 aa, Artificial Sequence
  Cyclic GFR-binding peptide
DENKNVVPIKGYVVNNASDFYLINIPS

SEQ ID NO: 118804 - protein, 27 aa, Artificial Sequence
  Cyclic GFR-binding peptide
DENKNVVYHYKLIIQQKDNKYLMSIPS

SEQ ID NO: 118805 - protein, 27 aa, Artificial Sequence
  Cyclic GFR-binding peptide
DENKNVVRYKKLVVNNASDFYLISIAN

SEQ ID NO: 118806 - protein, 27 aa, Artificial Sequence
  Cyclic GFR-binding peptide
DENKNVVRHKRLVVNNAADYYLISTAS

SEQ ID NO: 118807 - protein, 27 aa, Artificial Sequence
  Cyclic GFR-binding peptide
EPISILYLVGRTPKVKFKYEDENKNVV

SEQ ID NO: 118808 - protein, 27 aa, Artificial Sequence
  Cyclic GFR-binding peptide
SPISMLYKDEYDKVVLKYHYDENKNVV

SEQ ID NO: 118809 - protein, 27 aa, Artificial Sequence
  Cyclic GFR-binding peptide
EPISVLYLDDMGVPTKFKYEDENKNVV

SEQ ID NO: 118810 - protein, 27 aa, Artificial Sequence
  Cyclic GFR-binding peptide
NAISMLYFDEYDKVVLKKYRDENKNVV

SEQ ID NO: 118811 - protein, 27 aa, Artificial Sequence
  Cyclic GFR-binding peptide
SATSILYYVGRKPKVLRKHRDENKNVV

SEQ ID NO: 118812 - protein, 27 aa, Artificial Sequence
  Cyclic GFR-binding peptide
SPISILYKVGRKPKVLKYHYDENKNVV

SEQ ID NO: 118813 - protein, 27 aa, Artificial Sequence
  Cyclic GFR-binding peptide
EPISILYLIGKTPKIKFKYEDENKNVV

SEQ ID NO: 118814 - protein, 27 aa, Artificial Sequence
  Cyclic GFR-binding peptide
EPISILYLDENKNVVKFKYEDENKNVV

SEQ ID NO: 118815 - protein, 27 aa, Artificial Sequence
  Cyclic GFR-binding peptide
SPINILYFVGRTPKVYGKIPDENKNVV

SEQ ID NO: 118816 - protein, 27 aa, Artificial Sequence
  Cyclic GFR-binding peptide
SPINMLYFDENEKVVYGKIPDENKNVV

SEQ ID NO: 118817 - protein, 27 aa, Artificial Sequence
  Cyclic GFR-binding peptide
SPISILYKDKGVVTYLKYHYDENKNVV

SEQ ID NO: 118818 - protein, 27 aa, Artificial Sequence
  Cyclic GFR-binding peptide
EPISMLYLDNGRVLLKFKYEDENKNVV

SEQ ID NO: 118819 - protein, 27 aa, Artificial Sequence
  Cyclic GFR-binding peptide
NAISILYFVGRKPKVLKKYRDENKNVV

SEQ ID NO: 118820 - protein, 27 aa, Artificial Sequence
  Cyclic GFR-binding peptide
SPINVLYFDDMGVPTYGKIPDENKNVV

SEQ ID NO: 118821 - protein, 27 aa, Artificial Sequence
  Cyclic GFR-binding peptide
SPISILYKDENKNVVLKYHYDENKNVV

SEQ ID NO: 118822 - protein, 27 aa, Artificial Sequence
  Cyclic GFR-binding peptide
SPISVLYKDDSSNVILKYHYDENKNVV

SEQ ID NO: 118823 - protein, 27 aa, Artificial Sequence
  Cyclic GFR-binding peptide
SPINVLYFDDSSNVIYGKIPDENKNVV

SEQ ID NO: 118824 - protein, 27 aa, Artificial Sequence
  Cyclic GFR-binding peptide
NAISILYFDKGVVTYLKKYRDENKNVV

SEQ ID NO: 118825 - protein, 27 aa, Artificial Sequence
  Cyclic GFR-binding peptide
SATSMLYYDNGRVLLLRKHRDENKNVV

SEQ ID NO: 118826 - protein, 27 aa, Artificial Sequence
  Cyclic GFR-binding peptide
SPISMLYKDNGRVLLLKYHYDENKNVV

SEQ ID NO: 118827 - protein, 27 aa, Artificial Sequence
  Cyclic GFR-binding peptide
NAISVLYFDDSSNVILKKYRDENKNVV

SEQ ID NO: 118828 - protein, 27 aa, Artificial Sequence
  Cyclic GFR-binding peptide
SATSILYYDENKNVVLRKHRDENKNVV

SEQ ID NO: 118829 - protein, 27 aa, Artificial Sequence
  Cyclic GFR-binding peptide
SATSILYYIGKTPKILRKHRDENKNVV

SEQ ID NO: 118830 - protein, 27 aa, Artificial Sequence
  Cyclic GFR-binding peptide
SPINILYFDKGVVTYYGKIPDENKNVV

SEQ ID NO: 118831 - protein, 27 aa, Artificial Sequence
  Cyclic GFR-binding peptide
SPISVLYKDDMGVPTLKYHYDENKNVV

SEQ ID NO: 118832 - protein, 27 aa, Artificial Sequence
  Cyclic GFR-binding peptide
SATSVLYYDSSNNVILRKHRDENKNVV

SEQ ID NO: 118833 - protein, 27 aa, Artificial Sequence
  Cyclic GFR-binding peptide
NAISMLYFDNGRVLLLKKYRDENKNVV

SEQ ID NO: 118834 - protein, 27 aa, Artificial Sequence
  Cyclic GFR-binding peptide
SPISILYKVGRTPKVLKYHYDENKNVV

SEQ ID NO: 118835 - protein, 27 aa, Artificial Sequence
  Cyclic GFR-binding peptide
SATSVLYYDDSSNVILRKHRDENKNVV

SEQ ID NO: 118836 - protein, 27 aa, Artificial Sequence
  Cyclic GFR-binding peptide
SPINMLYFDNGRVLLYGKIPDENKNVV

SEQ ID NO: 118837 - protein, 27 aa, Artificial Sequence
  Cyclic GFR-binding peptide
NAISILYFDENKNVVLKKYRDENKNVV

SEQ ID NO: 118838 - protein, 27 aa, Artificial Sequence
  Cyclic GFR-binding peptide
EPISMLYLDEYDKVVKFKYEDENKNVV

SEQ ID NO: 118839 - protein, 27 aa, Artificial Sequence
  Cyclic GFR-binding peptide
SPINILYFDENKNVVYGKIPDENKNVV

SEQ ID NO: 118840 - protein, 27 aa, Artificial Sequence
  Cyclic GFR-binding peptide
SPINILYFIGKTPKIYGKIPDENKNVV

SEQ ID NO: 118841 - protein, 27 aa, Artificial Sequence
  Cyclic GFR-binding peptide
EPISILYLDAANNVVKFKYEDENKNVV

SEQ ID NO: 118842 - protein, 27 aa, Artificial Sequence
  Cyclic GFR-binding peptide
SATSILYYDKGVVTYLRKHRDENKNVV

SEQ ID NO: 118843 - protein, 27 aa, Artificial Sequence
  Cyclic GFR-binding peptide
NAISILYFIGKTPKILKKYRDENKNVV

SEQ ID NO: 118844 - protein, 27 aa, Artificial Sequence
  Cyclic GFR-binding peptide
SPINMLYFDEYDKVVYGKIPDENKNVV

SEQ ID NO: 118845 - protein, 27 aa, Artificial Sequence
  Cyclic GFR-binding peptide
EPISILYLDSANNVVKFKYEDENKNVV

SEQ ID NO: 118846 - protein, 27 aa, Artificial Sequence
  Cyclic GFR-binding peptide
NAISILYFVGRTPKVLKKYRDENKNVV

SEQ ID NO: 118847 - protein, 27 aa, Artificial Sequence
  Cyclic GFR-binding peptide
SATSMLYYDENEKVVLRKHRDENKNVV

SEQ ID NO: 118848 - protein, 27 aa, Artificial Sequence
  Cyclic GFR-binding peptide
SPISILYKIGKTPKILKYHYDENKNVV

SEQ ID NO: 118849 - protein, 27 aa, Artificial Sequence
  Cyclic GFR-binding peptide
SPISMLYKDENEKVVLKYHYDENKNVV

SEQ ID NO: 118850 - protein, 27 aa, Artificial Sequence
  Cyclic GFR-binding peptide
SATSMLYYNDKQQIILRKHRDENKNVV

SEQ ID NO: 118851 - protein, 27 aa, Artificial Sequence
  Cyclic GFR-binding peptide
NAISMLYFDENEKVVLKKYRDENKNVV

SEQ ID NO: 118852 - protein, 27 aa, Artificial Sequence
  Cyclic GFR-binding peptide
NAISILYFDAANNVVLKKYRDENKNVV

SEQ ID NO: 118853 - protein, 27 aa, Artificial Sequence
  Cyclic GFR-binding peptide
EPISMLYLNDKQQIIKFKYEDENKNVV

SEQ ID NO: 118854 - protein, 27 aa, Artificial Sequence
  Cyclic GFR-binding peptide
NAISVLYFDDMGVPTLKKYRDENKNVV

SEQ ID NO: 118855 - protein, 27 aa, Artificial Sequence
  Cyclic GFR-binding peptide
SPISILYKDAANNVVLKYHYDENKNVV

SEQ ID NO: 118856 - protein, 27 aa, Artificial Sequence
  Cyclic GFR-binding peptide
SPINVLYFDSSNNVIYGKIPDENKNVV

SEQ ID NO: 118857 - protein, 27 aa, Artificial Sequence
  Cyclic GFR-binding peptide
SPINILYFVGRKPKVYGKIPDENKNVV

SEQ ID NO: 118858 - protein, 27 aa, Artificial Sequence
  Cyclic GFR-binding peptide
NAISMLYFNDKQQIILKKYRDENKNVV

SEQ ID NO: 118859 - protein, 27 aa, Artificial Sequence
  Cyclic GFR-binding peptide
SPINMLYFNDKQQIIYGKIPDENKNVV

SEQ ID NO: 118860 - protein, 27 aa, Artificial Sequence
  Cyclic GFR-binding peptide
NAISVLYFDSSNNVILKKYRDENKNVV

SEQ ID NO: 118861 - protein, 27 aa, Artificial Sequence
  Cyclic GFR-binding peptide
SPINILYFDAANNVVYGKIPDENKNVV

SEQ ID NO: 118862 - protein, 27 aa, Artificial Sequence
  Cyclic GFR-binding peptide
SATSILYYVGRTPKVLRKHRDENKNVV

SEQ ID NO: 118863 - protein, 27 aa, Artificial Sequence
  Cyclic GFR-binding peptide
EPISVLYLDSSNNVIKFKYEDENKNVV

SEQ ID NO: 118864 - protein, 27 aa, Artificial Sequence
  Cyclic GFR-binding peptide
SATSILYYDSANNVVLRKHRDENKNVV

SEQ ID NO: 118865 - protein, 27 aa, Artificial Sequence
  Cyclic GFR-binding peptide
SATSVLYYDDMGVPTLRKHRDENKNVV

SEQ ID NO: 118866 - protein, 27 aa, Artificial Sequence
  Cyclic GFR-binding peptide
SPISVLYKDSSNNVILKYHYDENKNVV

SEQ ID NO: 118867 - protein, 27 aa, Artificial Sequence
  Cyclic GFR-binding peptide
SPISILYKDSANNVVLKYHYDENKNVV

SEQ ID NO: 118868 - protein, 27 aa, Artificial Sequence
  Cyclic GFR-binding peptide
EPISVLYLDDSSNVIKFKYEDENKNVV

SEQ ID NO: 118869 - protein, 27 aa, Artificial Sequence
  Cyclic GFR-binding peptide
EPISILYLVGRKPKVKFKYEDENKNVV

SEQ ID NO: 118870 - protein, 27 aa, Artificial Sequence
  Cyclic GFR-binding peptide
SATSMLYYDEYDKVVLRKHRDENKNVV

SEQ ID NO: 118871 - protein, 27 aa, Artificial Sequence
  Cyclic GFR-binding peptide
EPISMLYLDENEKVVKFKYEDENKNVV

SEQ ID NO: 118872 - protein, 27 aa, Artificial Sequence
  Cyclic GFR-binding peptide
EPISILYLDKGVVTYKFKYEDENKNVV

SEQ ID NO: 118873 - protein, 27 aa, Artificial Sequence
  Cyclic GFR-binding peptide
SPINILYFDSANNVVYGKIPDENKNVV

SEQ ID NO: 118874 - protein, 27 aa, Artificial Sequence
  Cyclic GFR-binding peptide
SPISMLYKNDKQQIILKYHYDENKNVV

SEQ ID NO: 118875 - protein, 27 aa, Artificial Sequence
  Cyclic GFR-binding peptide
NAISILYFDSANNVVLKKYRDENKNVV

SEQ ID NO: 118876 - protein, 27 aa, Artificial Sequence
  Cyclic GFR-binding peptide
SATSILYYDAANNVVLRKHRDENKNVV

SEQ ID NO: 118877 - protein, 27 aa, Artificial Sequence
  Cyclic GFR-binding peptide
DENKNVVSMEGIIIQQKDNMIQMTINS

SEQ ID NO: 118878 - protein, 27 aa, Artificial Sequence
  Cyclic GFR-binding peptide
DENKNVVSMEGIIVNSSDDMIQVTINS

SEQ ID NO: 118879 - protein, 27 aa, Artificial Sequence
  Cyclic GFR-binding peptide
DENKNVVSMEGLVKPKRGVMIQITINS

SEQ ID NO: 118880 - protein, 27 aa, Artificial Sequence
  Cyclic GFR-binding peptide
DENKNVVSMEGLVVNNASDMIQITINS

SEQ ID NO: 118881 - protein, 29 aa, Artificial Sequence
  Cyclic GFR-binding peptide
DENKNVVSMEGIFIPKKRVIEMIQVTINS

SEQ ID NO: 118882 - protein, 27 aa, Artificial Sequence
  Cyclic GFR-binding peptide
DENKNVVSMEGILLVRGNDMIQMTINS

SEQ ID NO: 118883 - protein, 29 aa, Artificial Sequence
  Cyclic GFR-binding peptide
DENKNVVSMEGILKPKKRVYEMIQVTINS

SEQ ID NO: 118884 - protein, 27 aa, Artificial Sequence
  Cyclic GFR-binding peptide
DENKNVVSMEGLIKPTKGIMIQITINS

SEQ ID NO: 118885 - protein, 27 aa, Artificial Sequence
  Cyclic GFR-binding peptide
DENKNVVSMEGLIVNSSDDMIQVTINS

SEQ ID NO: 118886 - protein, 29 aa, Artificial Sequence
  Cyclic GFR-binding peptide
DENKNVVSMEGIHQGQHPKIRMIQMTINS

SEQ ID NO: 118887 - protein, 27 aa, Artificial Sequence
  Cyclic GFR-binding peptide
DENKNVVSMEGIVVNNASDMIQITINS

SEQ ID NO: 118888 - protein, 29 aa, Artificial Sequence
  Cyclic GFR-binding peptide
DENKNVVSMEGLLKPKKRVYEMIQVTINS

SEQ ID NO: 118889 - protein, 27 aa, Artificial Sequence
  Cyclic GFR-binding peptide
DENKNVVSMEGIVKPKRGVMIQITINS

SEQ ID NO: 118890 - protein, 27 aa, Artificial Sequence
  Cyclic GFR-binding peptide
DENKNVVSMEGIVKPTRGVMIQITINS

SEQ ID NO: 118891 - protein, 27 aa, Artificial Sequence
  Cyclic GFR-binding peptide
DENKNVVSMEGLVVNNAADMIQITINS

SEQ ID NO: 118892 - protein, 27 aa, Artificial Sequence
  Cyclic GFR-binding peptide
DENKNVVSMEGLLLVRGNDMIQMTINS

SEQ ID NO: 118893 - protein, 27 aa, Artificial Sequence
  Cyclic GFR-binding peptide
DENKNVVSMEGIIKPTKGIMIQITINS

SEQ ID NO: 118894 - protein, 27 aa, Artificial Sequence
  Cyclic GFR-binding peptide
DENKNVVSMEGLIIQQKDNMIQMTINS

SEQ ID NO: 118895 - protein, 29 aa, Artificial Sequence
  Cyclic GFR-binding peptide
DENKNVVSMEGLHQGQHPKIRMIQMTINS

SEQ ID NO: 118896 - protein, 27 aa, Artificial Sequence
  Cyclic GFR-binding peptide
DENKNVVSMEGIVVNNAADMIQITINS

SEQ ID NO: 118897 - protein, 29 aa, Artificial Sequence
  Cyclic GFR-binding peptide
DENKNVVSMEGLFIPKKRVIEMIQVTINS

SEQ ID NO: 118898 - protein, 27 aa, Artificial Sequence
  Cyclic GFR-binding peptide
DENKNVVSMEGLVKPTRGVMIQITINS

SEQ ID NO: 118899 - protein, 27 aa, Artificial Sequence
  Cyclic GFR-binding peptide
SNITMQIMNDKQQIIIGEMSDENKNVV

SEQ ID NO: 118900 - protein, 27 aa, Artificial Sequence
  Cyclic GFR-binding peptide
SNITVQIMDDSSNVIIGEMSDENKNVV

SEQ ID NO: 118901 - protein, 27 aa, Artificial Sequence
  Cyclic GFR-binding peptide
SNITIQIMVGRKPKVLGEMSDENKNVV

SEQ ID NO: 118902 - protein, 27 aa, Artificial Sequence
  Cyclic GFR-binding peptide
SNITIQIMDSANNVVLGEMSDENKNVV

SEQ ID NO: 118903 - protein, 29 aa, Artificial Sequence
  Cyclic GFR-binding peptide
SNITVQIMEIVRKKPIFIGEMSDENKNVV

SEQ ID NO: 118904 - protein, 27 aa, Artificial Sequence
  Cyclic GFR-binding peptide
SNITMQIMDNGRVLLIGEMSDENKNVV

SEQ ID NO: 118905 - protein, 29 aa, Artificial Sequence
  Cyclic GFR-binding peptide
SNITVQIMEYVRKKPKLIGEMSDENKNVV

SEQ ID NO: 118906 - protein, 27 aa, Artificial Sequence
  Cyclic GFR-binding peptide
SNITIQIMIGKTPKILGEMSDENKNVV

SEQ ID NO: 118907 - protein, 27 aa, Artificial Sequence
  Cyclic GFR-binding peptide
SNITVQIMDDSSNVILGEMSDENKNVV

SEQ ID NO: 118908 - protein, 29 aa, Artificial Sequence
  Cyclic GFR-binding peptide
SNITMQIMRIKPHQGQHIGEMSDENKNVV

SEQ ID NO: 118909 - protein, 27 aa, Artificial Sequence
  Cyclic GFR-binding peptide
SNITIQIMDSANNVVIGEMSDENKNVV

SEQ ID NO: 118910 - protein, 29 aa, Artificial Sequence
  Cyclic GFR-binding peptide
SNITVQIMEYVRKKPKLLGEMSDENKNVV

SEQ ID NO: 118911 - protein, 27 aa, Artificial Sequence
  Cyclic GFR-binding peptide
SNITIQIMVGRKPKVIGEMSDENKNVV

SEQ ID NO: 118912 - protein, 27 aa, Artificial Sequence
  Cyclic GFR-binding peptide
SNITIQIMVGRTPKVIGEMSDENKNVV

SEQ ID NO: 118913 - protein, 27 aa, Artificial Sequence
  Cyclic GFR-binding peptide
SNITIQIMDAANNVVLGEMSDENKNVV

SEQ ID NO: 118914 - protein, 27 aa, Artificial Sequence
  Cyclic GFR-binding peptide
SNITMQIMDNGRVLLLGEMSDENKNVV

SEQ ID NO: 118915 - protein, 27 aa, Artificial Sequence
  Cyclic GFR-binding peptide
SNITIQIMIGKTPKIIGEMSDENKNVV

SEQ ID NO: 118916 - protein, 27 aa, Artificial Sequence
  Cyclic GFR-binding peptide
SNITMQIMNDKQQIILGEMSDENKNVV

SEQ ID NO: 118917 - protein, 29 aa, Artificial Sequence
  Cyclic GFR-binding peptide
SNITMQIMRIKPHQGQHLGEMSDENKNVV

SEQ ID NO: 118918 - protein, 27 aa, Artificial Sequence
  Cyclic GFR-binding peptide
SNITIQIMDAANNVVIGEMSDENKNVV

SEQ ID NO: 118919 - protein, 29 aa, Artificial Sequence
  Cyclic GFR-binding peptide
SNITVQIMEIVRKKPIFLGEMSDENKNVV

SEQ ID NO: 118920 - protein, 27 aa, Artificial Sequence
  Cyclic GFR-binding peptide
SNITIQIMVGRTPKVLGEMSDENKNVV

SEQ ID NO: 118921 - protein, 27 aa, Artificial Sequence
  Cyclic GFR-binding peptide
DENKNVVRYKKLIKPTKGIFYLISIAN

SEQ ID NO: 118922 - protein, 27 aa, Artificial Sequence
  Cyclic GFR-binding peptide
DENKNVVQYNKLVVNKNEDLYLISIAS

SEQ ID NO: 118923 - protein, 27 aa, Artificial Sequence
  Cyclic GFR-binding peptide
DENKNVVQYNKLVVNNAADLYLISIAS

SEQ ID NO: 118924 - protein, 27 aa, Artificial Sequence
  Cyclic GFR-binding peptide
DENKNVVQYNKLIVNNSSDLYLVSIAS

SEQ ID NO: 118925 - protein, 27 aa, Artificial Sequence
  Cyclic GFR-binding peptide
DENKNVVRYKKLVVKDYEDFYLMSIAN

SEQ ID NO: 118926 - protein, 27 aa, Artificial Sequence
  Cyclic GFR-binding peptide
DENKNVVRYKKLVKPTRGVFYLISIAN

SEQ ID NO: 118927 - protein, 27 aa, Artificial Sequence
  Cyclic GFR-binding peptide
DENKNVVQYNKLIIQQKDNLYLMSIAS

SEQ ID NO: 118928 - protein, 27 aa, Artificial Sequence
  Cyclic GFR-binding peptide
DENKNVVQYNKLLLVRGNDLYLMSIAS

SEQ ID NO: 118929 - protein, 27 aa, Artificial Sequence
  Cyclic GFR-binding peptide
DENKNVVQYNKLVKPTRGVLYLISIAS

SEQ ID NO: 118930 - protein, 27 aa, Artificial Sequence
  Cyclic GFR-binding peptide
DENKNVVRYKKLVVKENEDFYLMSIAN

SEQ ID NO: 118931 - protein, 27 aa, Artificial Sequence
  Cyclic GFR-binding peptide
DENKNVVRYKKLVVNNAADFYLISIAN

SEQ ID NO: 118932 - protein, 27 aa, Artificial Sequence
  Cyclic GFR-binding peptide
DENKNVVQYNKLTPVGMDDLYLVSIAS

SEQ ID NO: 118933 - protein, 27 aa, Artificial Sequence
  Cyclic GFR-binding peptide
DENKNVVRYKKLTPVGMDDFYLVSIAN

SEQ ID NO: 118934 - protein, 27 aa, Artificial Sequence
  Cyclic GFR-binding peptide
DENKNVVRYKKLVKPKRGVFYLISIAN

SEQ ID NO: 118935 - protein, 27 aa, Artificial Sequence
  Cyclic GFR-binding peptide
DENKNVVQYNKLVVKENEDLYLMSIAS

SEQ ID NO: 118936 - protein, 27 aa, Artificial Sequence
  Cyclic GFR-binding peptide
DENKNVVRYKKLIIQQKDNFYLMSIAN

SEQ ID NO: 118937 - protein, 27 aa, Artificial Sequence
  Cyclic GFR-binding peptide
DENKNVVQYNKLVKPKRGVLYLISIAS

SEQ ID NO: 118938 - protein, 27 aa, Artificial Sequence
  Cyclic GFR-binding peptide
DENKNVVRYKKLIVNNSSDFYLVSIAN

SEQ ID NO: 118939 - protein, 27 aa, Artificial Sequence
  Cyclic GFR-binding peptide
DENKNVVRYKKLYTVVGKDFYLISIAN

SEQ ID NO: 118940 - protein, 27 aa, Artificial Sequence
  Cyclic GFR-binding peptide
DENKNVVRYKKLIVNSSDDFYLVSIAN

SEQ ID NO: 118941 - protein, 27 aa, Artificial Sequence
  Cyclic GFR-binding peptide
DENKNVVRYKKLLLVRGNDFYLMSIAN

SEQ ID NO: 118942 - protein, 27 aa, Artificial Sequence
  Cyclic GFR-binding peptide
DENKNVVQYNKLVVNNASDLYLISIAS

SEQ ID NO: 118943 - protein, 27 aa, Artificial Sequence
  Cyclic GFR-binding peptide
DENKNVVQYNKLIKPTKGILYLISIAS

SEQ ID NO: 118944 - protein, 27 aa, Artificial Sequence
  Cyclic GFR-binding peptide
DENKNVVRYKKLVVNKNEDFYLISIAN

SEQ ID NO: 118945 - protein, 27 aa, Artificial Sequence
  Cyclic GFR-binding peptide
DENKNVVQYNKLYTVVGKDLYLISIAS

SEQ ID NO: 118946 - protein, 27 aa, Artificial Sequence
  Cyclic GFR-binding peptide
DENKNVVQYNKLVVKDYEDLYLMSIAS

SEQ ID NO: 118947 - protein, 27 aa, Artificial Sequence
  Cyclic GFR-binding peptide
DENKNVVRYKKLVVNNASDFYLISIAN

SEQ ID NO: 118948 - protein, 27 aa, Artificial Sequence
  Cyclic GFR-binding peptide
DENKNVVQYNKLIVNSSDDLYLVSIAS

SEQ ID NO: 118949 - protein, 27 aa, Artificial Sequence
  Cyclic GFR-binding peptide
NAISILYFIGKTPKILKKYRDENKNVV

SEQ ID NO: 118950 - protein, 27 aa, Artificial Sequence
  Cyclic GFR-binding peptide
SAISILYLDENKNVVLKNYQDENKNVV

SEQ ID NO: 118951 - protein, 27 aa, Artificial Sequence
  Cyclic GFR-binding peptide
SAISILYLDAANNVVLKNYQDENKNVV

SEQ ID NO: 118952 - protein, 27 aa, Artificial Sequence
  Cyclic GFR-binding peptide
SAISVLYLDSSNNVILKNYQDENKNVV

SEQ ID NO: 118953 - protein, 27 aa, Artificial Sequence
  Cyclic GFR-binding peptide
NAISMLYFDEYDKVVLKKYRDENKNVV

SEQ ID NO: 118954 - protein, 27 aa, Artificial Sequence
  Cyclic GFR-binding peptide
NAISILYFVGRTPKVLKKYRDENKNVV

SEQ ID NO: 118955 - protein, 27 aa, Artificial Sequence
  Cyclic GFR-binding peptide
SAISMLYLNDKQQIILKNYQDENKNVV

SEQ ID NO: 118956 - protein, 27 aa, Artificial Sequence
  Cyclic GFR-binding peptide
SAISMLYLDNGRVLLLKNYQDENKNVV

SEQ ID NO: 118957 - protein, 27 aa, Artificial Sequence
  Cyclic GFR-binding peptide
SAISILYLVGRTPKVLKNYQDENKNVV

SEQ ID NO: 118958 - protein, 27 aa, Artificial Sequence
  Cyclic GFR-binding peptide
NAISMLYFDENEKVVLKKYRDENKNVV

SEQ ID NO: 118959 - protein, 27 aa, Artificial Sequence
  Cyclic GFR-binding peptide
NAISILYFDAANNVVLKKYRDENKNVV

SEQ ID NO: 118960 - protein, 27 aa, Artificial Sequence
  Cyclic GFR-binding peptide
SAISVLYLDDMGVPTLKNYQDENKNVV

SEQ ID NO: 118961 - protein, 27 aa, Artificial Sequence
  Cyclic GFR-binding peptide
NAISVLYFDDMGVPTLKKYRDENKNVV

SEQ ID NO: 118962 - protein, 27 aa, Artificial Sequence
  Cyclic GFR-binding peptide
NAISILYFVGRKPKVLKKYRDENKNVV

SEQ ID NO: 118963 - protein, 27 aa, Artificial Sequence
  Cyclic GFR-binding peptide
SAISMLYLDENEKVVLKNYQDENKNVV

SEQ ID NO: 118964 - protein, 27 aa, Artificial Sequence
  Cyclic GFR-binding peptide
NAISMLYFNDKQQIILKKYRDENKNVV

SEQ ID NO: 118965 - protein, 27 aa, Artificial Sequence
  Cyclic GFR-binding peptide
SAISILYLVGRKPKVLKNYQDENKNVV

SEQ ID NO: 118966 - protein, 27 aa, Artificial Sequence
  Cyclic GFR-binding peptide
NAISVLYFDSSNNVILKKYRDENKNVV

SEQ ID NO: 118967 - protein, 27 aa, Artificial Sequence
  Cyclic GFR-binding peptide
NAISILYFDKGVVTYLKKYRDENKNVV

SEQ ID NO: 118968 - protein, 27 aa, Artificial Sequence
  Cyclic GFR-binding peptide
NAISVLYFDDSSNVILKKYRDENKNVV

SEQ ID NO: 118969 - protein, 27 aa, Artificial Sequence
  Cyclic GFR-binding peptide
NAISMLYFDNGRVLLLKKYRDENKNVV

SEQ ID NO: 118970 - protein, 27 aa, Artificial Sequence
  Cyclic GFR-binding peptide
SAISILYLDSANNVVLKNYQDENKNVV

SEQ ID NO: 118971 - protein, 27 aa, Artificial Sequence
  Cyclic GFR-binding peptide
SAISILYLIGKTPKILKNYQDENKNVV

SEQ ID NO: 118972 - protein, 27 aa, Artificial Sequence
  Cyclic GFR-binding peptide
NAISILYFDENKNVVLKKYRDENKNVV

SEQ ID NO: 118973 - protein, 27 aa, Artificial Sequence
  Cyclic GFR-binding peptide
SAISILYLDKGVVTYLKNYQDENKNVV

SEQ ID NO: 118974 - protein, 27 aa, Artificial Sequence
  Cyclic GFR-binding peptide
SAISMLYLDEYDKVVLKNYQDENKNVV

SEQ ID NO: 118975 - protein, 27 aa, Artificial Sequence
  Cyclic GFR-binding peptide
NAISILYFDSANNVVLKKYRDENKNVV

SEQ ID NO: 118976 - protein, 27 aa, Artificial Sequence
  Cyclic GFR-binding peptide
SAISVLYLDDSSNVILKNYQDENKNVV

SEQ ID NO: 118977 - protein, 29 aa, Artificial Sequence
  Cyclic GFR-binding peptide
DENKNVVVTAKKLKPKKRVYEIKRVQVPR

SEQ ID NO: 118978 - protein, 29 aa, Artificial Sequence
  Cyclic GFR-binding peptide
DENKNVVVQVEKLKPKKRVYEVKAVKVSR

SEQ ID NO: 118979 - protein, 27 aa, Artificial Sequence
  Cyclic GFR-binding peptide
DENKNVVVTAKKVKPTRGVIKRIQVPR

SEQ ID NO: 118980 - protein, 29 aa, Artificial Sequence
  Cyclic GFR-binding peptide
DENKNVVVQVEKFIPKKRVIEVKAVKVSR

SEQ ID NO: 118981 - protein, 29 aa, Artificial Sequence
  Cyclic GFR-binding peptide
DENKNVVVQVEKHQGQHPKIRVKAMKVSR

SEQ ID NO: 118982 - protein, 29 aa, Artificial Sequence
  Cyclic GFR-binding peptide
DENKNVVVTAKKHQGQHPKIRIKRMQVPR

SEQ ID NO: 118983 - protein, 27 aa, Artificial Sequence
  Cyclic GFR-binding peptide
DENKNVVVTAKKIKPTKGIIKRIQVPR

SEQ ID NO: 118984 - protein, 27 aa, Artificial Sequence
  Cyclic GFR-binding peptide
DENKNVVVQVEKVKPKRGVVKAIKVSR

SEQ ID NO: 118985 - protein, 27 aa, Artificial Sequence
  Cyclic GFR-binding peptide
DENKNVVVTAKKVKPKRGVIKRIQVPR

SEQ ID NO: 118986 - protein, 27 aa, Artificial Sequence
  Cyclic GFR-binding peptide
DENKNVVVQVEKIKPTKGIVKAIKVSR

SEQ ID NO: 118987 - protein, 27 aa, Artificial Sequence
  Cyclic GFR-binding peptide
DENKNVVVQVEKVKPTRGVVKAIKVSR

SEQ ID NO: 118988 - protein, 29 aa, Artificial Sequence
  Cyclic GFR-binding peptide
DENKNVVVTAKKFIPKKRVIEIKRVQVPR

SEQ ID NO: 118989 - protein, 29 aa, Artificial Sequence
  Cyclic GFR-binding peptide
RPVQVRKIEYVRKKPKLKKATVDENKNVV

SEQ ID NO: 118990 - protein, 29 aa, Artificial Sequence
  Cyclic GFR-binding peptide
RSVKVAKVEYVRKKPKLKEVQVDENKNVV

SEQ ID NO: 118991 - protein, 27 aa, Artificial Sequence
  Cyclic GFR-binding peptide
RPVQIRKIVGRTPKVKKATVDENKNVV

SEQ ID NO: 118992 - protein, 29 aa, Artificial Sequence
  Cyclic GFR-binding peptide
RSVKVAKVEIVRKKPIFKEVQVDENKNVV

SEQ ID NO: 118993 - protein, 29 aa, Artificial Sequence
  Cyclic GFR-binding peptide
RSVKMAKVRIKPHQGQHKEVQVDENKNVV

SEQ ID NO: 118994 - protein, 29 aa, Artificial Sequence
  Cyclic GFR-binding peptide
RPVQMRKIRIKPHQGQHKKATVDENKNVV

SEQ ID NO: 118995 - protein, 27 aa, Artificial Sequence
  Cyclic GFR-binding peptide
RPVQIRKIIGKTPKIKKATVDENKNVV

SEQ ID NO: 118996 - protein, 27 aa, Artificial Sequence
  Cyclic GFR-binding peptide
RSVKIAKVVGRKPKVKEVQVDENKNVV

SEQ ID NO: 118997 - protein, 27 aa, Artificial Sequence
  Cyclic GFR-binding peptide
RPVQIRKIVGRKPKVKKATVDENKNVV

SEQ ID NO: 118998 - protein, 27 aa, Artificial Sequence
  Cyclic GFR-binding peptide
RSVKIAKVIGKTPKIKEVQVDENKNVV

SEQ ID NO: 118999 - protein, 27 aa, Artificial Sequence
  Cyclic GFR-binding peptide
RSVKIAKVVGRTPKVKEVQVDENKNVV

SEQ ID NO: 119000 - protein, 29 aa, Artificial Sequence
  Cyclic GFR-binding peptide
RPVQVRKIEIVRKKPIFKKATVDENKNVV

SEQ ID NO: 119001 - protein, 27 aa, Artificial Sequence
  Cyclic GFR-binding peptide
DEYDKVVRYKKLIKPTKGIFYLISIAN

SEQ ID NO: 119002 - protein, 29 aa, Artificial Sequence
  Cyclic GFR-binding peptide
DEYDKVVRHKRLFIPKKRVIEYYLVSTAS

SEQ ID NO: 119003 - protein, 27 aa, Artificial Sequence
  Cyclic GFR-binding peptide
DEYDKVVYHYKLVVKDYEDKYLMSIPS

SEQ ID NO: 119004 - protein, 27 aa, Artificial Sequence
  Cyclic GFR-binding peptide
DEYDKVVQYNKLIVNNSSDLYLVSIAS

SEQ ID NO: 119005 - protein, 27 aa, Artificial Sequence
  Cyclic GFR-binding peptide
DEYDKVVRYKKLVVKDYEDFYLMSIAN

SEQ ID NO: 119006 - protein, 27 aa, Artificial Sequence
  Cyclic GFR-binding peptide
DEYDKVVRYKKLVKPTRGVFYLISIAN

SEQ ID NO: 119007 - protein, 27 aa, Artificial Sequence
  Cyclic GFR-binding peptide
DEYDKVVRHKRLVVKENEDYYLMSTAS

SEQ ID NO: 119008 - protein, 27 aa, Artificial Sequence
  Cyclic GFR-binding peptide
DEYDKVVYHYKLIKPTKGIKYLISIPS

SEQ ID NO: 119009 - protein, 29 aa, Artificial Sequence
  Cyclic GFR-binding peptide
DEYDKVVRYKKLFIPKKRVIEFYLVSIAN

SEQ ID NO: 119010 - protein, 27 aa, Artificial Sequence
  Cyclic GFR-binding peptide
DEYDKVVYHYKLVVKENEDKYLMSIPS

SEQ ID NO: 119011 - protein, 27 aa, Artificial Sequence
  Cyclic GFR-binding peptide
DEYDKVVRHKRLVKPKRGVYYLISTAS

SEQ ID NO: 119012 - protein, 27 aa, Artificial Sequence
  Cyclic GFR-binding peptide
DEYDKVVYHYKLVKPKRGVKYLISIPS

SEQ ID NO: 119013 - protein, 29 aa, Artificial Sequence
  Cyclic GFR-binding peptide
DEYDKVVQYNKLFIPKKRVIELYLVSIAS

SEQ ID NO: 119014 - protein, 27 aa, Artificial Sequence
  Cyclic GFR-binding peptide
DEYDKVVQYNKLVKPTRGVLYLISIAS

SEQ ID NO: 119015 - protein, 27 aa, Artificial Sequence
  Cyclic GFR-binding peptide
DEYDKVVRYKKLVVKENEDFYLMSIAN

SEQ ID NO: 119016 - protein, 27 aa, Artificial Sequence
  Cyclic GFR-binding peptide
DEYDKVVQYNKLTPVGMDDLYLVSIAS

SEQ ID NO: 119017 - protein, 27 aa, Artificial Sequence
  Cyclic GFR-binding peptide
DEYDKVVRYKKLTPVGMDDFYLVSIAN

SEQ ID NO: 119018 - protein, 27 aa, Artificial Sequence
  Cyclic GFR-binding peptide
DEYDKVVRYKKLVKPKRGVFYLISIAN

SEQ ID NO: 119019 - protein, 27 aa, Artificial Sequence
  Cyclic GFR-binding peptide
DEYDKVVQYNKLVVKENEDLYLMSIAS

SEQ ID NO: 119020 - protein, 27 aa, Artificial Sequence
  Cyclic GFR-binding peptide
DEYDKVVYHYKLIVNSSDDKYLVSIPS

SEQ ID NO: 119021 - protein, 27 aa, Artificial Sequence
  Cyclic GFR-binding peptide
DEYDKVVQYNKLVKPKRGVLYLISIAS

SEQ ID NO: 119022 - protein, 27 aa, Artificial Sequence
  Cyclic GFR-binding peptide
DEYDKVVRYKKLIVNNSSDFYLVSIAN

SEQ ID NO: 119023 - protein, 27 aa, Artificial Sequence
  Cyclic GFR-binding peptide
DEYDKVVRYKKLIVNSSDDFYLVSIAN

SEQ ID NO: 119024 - protein, 27 aa, Artificial Sequence
  Cyclic GFR-binding peptide
DEYDKVVRHKRLVKPTRGVYYLISTAS

SEQ ID NO: 119025 - protein, 29 aa, Artificial Sequence
  Cyclic GFR-binding peptide
DEYDKVVYHYKLFIPKKRVIEKYLVSIPS

SEQ ID NO: 119026 - protein, 27 aa, Artificial Sequence
  Cyclic GFR-binding peptide
DEYDKVVRHKRLIKPTKGIYYLISTAS

SEQ ID NO: 119027 - protein, 27 aa, Artificial Sequence
  Cyclic GFR-binding peptide
DEYDKVVRHKRLTPVGMDDYYLVSTAS

SEQ ID NO: 119028 - protein, 27 aa, Artificial Sequence
  Cyclic GFR-binding peptide
DEYDKVVYHYKLTPVGMDDKYLVSIPS

SEQ ID NO: 119029 - protein, 27 aa, Artificial Sequence
  Cyclic GFR-binding peptide
DEYDKVVYHYKLIVNNSSDKYLVSIPS

SEQ ID NO: 119030 - protein, 27 aa, Artificial Sequence
  Cyclic GFR-binding peptide
DEYDKVVRHKRLIVNNSSDYYLVSTAS

SEQ ID NO: 119031 - protein, 27 aa, Artificial Sequence
  Cyclic GFR-binding peptide
DEYDKVVYHYKLVKPTRGVKYLISIPS

SEQ ID NO: 119032 - protein, 27 aa, Artificial Sequence
  Cyclic GFR-binding peptide
DEYDKVVRHKRLIVNSSDDYYLVSTAS

SEQ ID NO: 119033 - protein, 27 aa, Artificial Sequence
  Cyclic GFR-binding peptide
DEYDKVVRHKRLVVKDYEDYYLMSTAS

SEQ ID NO: 119034 - protein, 27 aa, Artificial Sequence
  Cyclic GFR-binding peptide
DEYDKVVQYNKLIKPTKGILYLISIAS

SEQ ID NO: 119035 - protein, 27 aa, Artificial Sequence
  Cyclic GFR-binding peptide
DEYDKVVQYNKLVVKDYEDLYLMSIAS

SEQ ID NO: 119036 - protein, 27 aa, Artificial Sequence
  Cyclic GFR-binding peptide
DEYDKVVQYNKLIVNSSDDLYLVSIAS

SEQ ID NO: 119037 - protein, 27 aa, Artificial Sequence
  Cyclic GFR-binding peptide
NAISILYFIGKTPKILKKYRDEYDKVV

SEQ ID NO: 119038 - protein, 29 aa, Artificial Sequence
  Cyclic GFR-binding peptide
SATSVLYYEIVRKKPIFLRKHRDEYDKVV

SEQ ID NO: 119039 - protein, 27 aa, Artificial Sequence
  Cyclic GFR-binding peptide
SPISMLYKDEYDKVVLKYHYDEYDKVV

SEQ ID NO: 119040 - protein, 27 aa, Artificial Sequence
  Cyclic GFR-binding peptide
SAISVLYLDSSNNVILKNYQDEYDKVV

SEQ ID NO: 119041 - protein, 27 aa, Artificial Sequence
  Cyclic GFR-binding peptide
NAISMLYFDEYDKVVLKKYRDEYDKVV

SEQ ID NO: 119042 - protein, 27 aa, Artificial Sequence
  Cyclic GFR-binding peptide
NAISILYFVGRTPKVLKKYRDEYDKVV

SEQ ID NO: 119043 - protein, 27 aa, Artificial Sequence
  Cyclic GFR-binding peptide
SATSMLYYDENEKVVLRKHRDEYDKVV

SEQ ID NO: 119044 - protein, 27 aa, Artificial Sequence
  Cyclic GFR-binding peptide
SPISILYKIGKTPKILKYHYDEYDKVV

SEQ ID NO: 119045 - protein, 29 aa, Artificial Sequence
  Cyclic GFR-binding peptide
NAISVLYFEIVRKKPIFLKKYRDEYDKVV

SEQ ID NO: 119046 - protein, 27 aa, Artificial Sequence
  Cyclic GFR-binding peptide
SPISMLYKDENEKVVLKYHYDEYDKVV

SEQ ID NO: 119047 - protein, 27 aa, Artificial Sequence
  Cyclic GFR-binding peptide
SATSILYYVGRKPKVLRKHRDEYDKVV

SEQ ID NO: 119048 - protein, 27 aa, Artificial Sequence
  Cyclic GFR-binding peptide
SPISILYKVGRKPKVLKYHYDEYDKVV

SEQ ID NO: 119049 - protein, 29 aa, Artificial Sequence
  Cyclic GFR-binding peptide
SAISVLYLEIVRKKPIFLKNYQDEYDKVV

SEQ ID NO: 119050 - protein, 27 aa, Artificial Sequence
  Cyclic GFR-binding peptide
SAISILYLVGRTPKVLKNYQDEYDKVV

SEQ ID NO: 119051 - protein, 27 aa, Artificial Sequence
  Cyclic GFR-binding peptide
NAISMLYFDENEKVVLKKYRDEYDKVV

SEQ ID NO: 119052 - protein, 27 aa, Artificial Sequence
  Cyclic GFR-binding peptide
SAISVLYLDDMGVPTLKNYQDEYDKVV

SEQ ID NO: 119053 - protein, 27 aa, Artificial Sequence
  Cyclic GFR-binding peptide
NAISVLYFDDMGVPTLKKYRDEYDKVV

SEQ ID NO: 119054 - protein, 27 aa, Artificial Sequence
  Cyclic GFR-binding peptide
NAISILYFVGRKPKVLKKYRDEYDKVV

SEQ ID NO: 119055 - protein, 27 aa, Artificial Sequence
  Cyclic GFR-binding peptide
SAISMLYLDENEKVVLKNYQDEYDKVV

SEQ ID NO: 119056 - protein, 27 aa, Artificial Sequence
  Cyclic GFR-binding peptide
SPISVLYKDDSSNVILKYHYDEYDKVV

SEQ ID NO: 119057 - protein, 27 aa, Artificial Sequence
  Cyclic GFR-binding peptide
SAISILYLVGRKPKVLKNYQDEYDKVV

SEQ ID NO: 119058 - protein, 27 aa, Artificial Sequence
  Cyclic GFR-binding peptide
NAISVLYFDSSNNVILKKYRDEYDKVV

SEQ ID NO: 119059 - protein, 27 aa, Artificial Sequence
  Cyclic GFR-binding peptide
NAISVLYFDDSSNVILKKYRDEYDKVV

SEQ ID NO: 119060 - protein, 27 aa, Artificial Sequence
  Cyclic GFR-binding peptide
SATSILYYVGRTPKVLRKHRDEYDKVV

SEQ ID NO: 119061 - protein, 29 aa, Artificial Sequence
  Cyclic GFR-binding peptide
SPISVLYKEIVRKKPIFLKYHYDEYDKVV

SEQ ID NO: 119062 - protein, 27 aa, Artificial Sequence
  Cyclic GFR-binding peptide
SATSILYYIGKTPKILRKHRDEYDKVV

SEQ ID NO: 119063 - protein, 27 aa, Artificial Sequence
  Cyclic GFR-binding peptide
SATSVLYYDDMGVPTLRKHRDEYDKVV

SEQ ID NO: 119064 - protein, 27 aa, Artificial Sequence
  Cyclic GFR-binding peptide
SPISVLYKDDMGVPTLKYHYDEYDKVV

SEQ ID NO: 119065 - protein, 27 aa, Artificial Sequence
  Cyclic GFR-binding peptide
SPISVLYKDSSNNVILKYHYDEYDKVV

SEQ ID NO: 119066 - protein, 27 aa, Artificial Sequence
  Cyclic GFR-binding peptide
SATSVLYYDSSNNVILRKHRDEYDKVV

SEQ ID NO: 119067 - protein, 27 aa, Artificial Sequence
  Cyclic GFR-binding peptide
SPISILYKVGRTPKVLKYHYDEYDKVV

SEQ ID NO: 119068 - protein, 27 aa, Artificial Sequence
  Cyclic GFR-binding peptide
SATSVLYYDDSSNVILRKHRDEYDKVV

SEQ ID NO: 119069 - protein, 27 aa, Artificial Sequence
  Cyclic GFR-binding peptide
SATSMLYYDEYDKVVLRKHRDEYDKVV

SEQ ID NO: 119070 - protein, 27 aa, Artificial Sequence
  Cyclic GFR-binding peptide
SAISILYLIGKTPKILKNYQDEYDKVV

SEQ ID NO: 119071 - protein, 27 aa, Artificial Sequence
  Cyclic GFR-binding peptide
SAISMLYLDEYDKVVLKNYQDEYDKVV

SEQ ID NO: 119072 - protein, 27 aa, Artificial Sequence
  Cyclic GFR-binding peptide
SAISVLYLDDSSNVILKNYQDEYDKVV

SEQ ID NO: 119073 - protein, 27 aa, Artificial Sequence
  Cyclic GFR-binding peptide
DEYDKVVRYKKLIKPTKGIFYLISIAN

SEQ ID NO: 119074 - protein, 27 aa, Artificial Sequence
  Cyclic GFR-binding peptide
DEYDKVVNSLQEVVKDYEDYYLMTLPE

SEQ ID NO: 119075 - protein, 27 aa, Artificial Sequence
  Cyclic GFR-binding peptide
DEYDKVVNSLQEIKPTKGIYYVIPLPE

SEQ ID NO: 119076 - protein, 27 aa, Artificial Sequence
  Cyclic GFR-binding peptide
DEYDKVVNSLQEVKPKRGVYYLITLPE

SEQ ID NO: 119077 - protein, 27 aa, Artificial Sequence
  Cyclic GFR-binding peptide
DEYDKVVNSLQEVKPTRGVYYVIPLPE

SEQ ID NO: 119078 - protein, 27 aa, Artificial Sequence
  Cyclic GFR-binding peptide
DEYDKVVRYKKLVVKDYEDFYLMSIAN

SEQ ID NO: 119079 - protein, 27 aa, Artificial Sequence
  Cyclic GFR-binding peptide
DEYDKVVEYQKYIVNSSDDIFLVSIPS

SEQ ID NO: 119080 - protein, 27 aa, Artificial Sequence
  Cyclic GFR-binding peptide
DEYDKVVEYQKYVKPTRGVIFLISIPS

SEQ ID NO: 119081 - protein, 27 aa, Artificial Sequence
  Cyclic GFR-binding peptide
DEYDKVVNSLQEVVKENEDYYLMTLPE

SEQ ID NO: 119082 - protein, 27 aa, Artificial Sequence
  Cyclic GFR-binding peptide
DEYDKVVRYKKLVKPTRGVFYLISIAN

SEQ ID NO: 119083 - protein, 27 aa, Artificial Sequence
  Cyclic GFR-binding peptide
DEYDKVVNSLQEVVNNASDYYLITLPE

SEQ ID NO: 119084 - protein, 27 aa, Artificial Sequence
  Cyclic GFR-binding peptide
DEYDKVVNSLQEVKPKRGVYYVIPLPE

SEQ ID NO: 119085 - protein, 27 aa, Artificial Sequence
  Cyclic GFR-binding peptide
DEYDKVVNSLQEVVNNASDYYVIPLPE

SEQ ID NO: 119086 - protein, 27 aa, Artificial Sequence
  Cyclic GFR-binding peptide
DEYDKVVNSLQEVKPTRGVYYLITLPE

SEQ ID NO: 119087 - protein, 27 aa, Artificial Sequence
  Cyclic GFR-binding peptide
DEYDKVVQYNKLVKPTRGVLYLISIAS

SEQ ID NO: 119088 - protein, 27 aa, Artificial Sequence
  Cyclic GFR-binding peptide
DEYDKVVRYKKLVVKENEDFYLMSIAN

SEQ ID NO: 119089 - protein, 27 aa, Artificial Sequence
  Cyclic GFR-binding peptide
DEYDKVVEYQKYIKPTKGIIFLISIPS

SEQ ID NO: 119090 - protein, 27 aa, Artificial Sequence
  Cyclic GFR-binding peptide
DEYDKVVEYQKYVVNNASDIFLISIPS

SEQ ID NO: 119091 - protein, 27 aa, Artificial Sequence
  Cyclic GFR-binding peptide
DEYDKVVRYKKLVKPKRGVFYLISIAN

SEQ ID NO: 119092 - protein, 27 aa, Artificial Sequence
  Cyclic GFR-binding peptide
DEYDKVVNSLQEIVNSSDDYYVVPLPE

SEQ ID NO: 119093 - protein, 27 aa, Artificial Sequence
  Cyclic GFR-binding peptide
DEYDKVVNSLQEVVKDYEDYYVMPLPE

SEQ ID NO: 119094 - protein, 27 aa, Artificial Sequence
  Cyclic GFR-binding peptide
DEYDKVVQYNKLVVKENEDLYLMSIAS

SEQ ID NO: 119095 - protein, 27 aa, Artificial Sequence
  Cyclic GFR-binding peptide
DEYDKVVEYQKYVVKENEDIFLMSIPS

SEQ ID NO: 119096 - protein, 27 aa, Artificial Sequence
  Cyclic GFR-binding peptide
DEYDKVVQYNKLVKPKRGVLYLISIAS

SEQ ID NO: 119097 - protein, 27 aa, Artificial Sequence
  Cyclic GFR-binding peptide
DEYDKVVRYKKLIVNSSDDFYLVSIAN

SEQ ID NO: 119098 - protein, 27 aa, Artificial Sequence
  Cyclic GFR-binding peptide
DEYDKVVNSLQEVVKENEDYYVMPLPE

SEQ ID NO: 119099 - protein, 27 aa, Artificial Sequence
  Cyclic GFR-binding peptide
DEYDKVVEYQKYVVKDYEDIFLMSIPS

SEQ ID NO: 119100 - protein, 27 aa, Artificial Sequence
  Cyclic GFR-binding peptide
DEYDKVVQYNKLVVNNASDLYLISIAS

SEQ ID NO: 119101 - protein, 27 aa, Artificial Sequence
  Cyclic GFR-binding peptide
DEYDKVVQYNKLIKPTKGILYLISIAS

SEQ ID NO: 119102 - protein, 27 aa, Artificial Sequence
  Cyclic GFR-binding peptide
DEYDKVVNSLQEIKPTKGIYYLITLPE

SEQ ID NO: 119103 - protein, 27 aa, Artificial Sequence
  Cyclic GFR-binding peptide
DEYDKVVEYQKYVKPKRGVIFLISIPS

SEQ ID NO: 119104 - protein, 27 aa, Artificial Sequence
  Cyclic GFR-binding peptide
DEYDKVVQYNKLVVKDYEDLYLMSIAS

SEQ ID NO: 119105 - protein, 27 aa, Artificial Sequence
  Cyclic GFR-binding peptide
DEYDKVVRYKKLVVNNASDFYLISIAN

SEQ ID NO: 119106 - protein, 27 aa, Artificial Sequence
  Cyclic GFR-binding peptide
DEYDKVVNSLQEIVNSSDDYYLVTLPE

SEQ ID NO: 119107 - protein, 27 aa, Artificial Sequence
  Cyclic GFR-binding peptide
DEYDKVVQYNKLIVNSSDDLYLVSIAS

SEQ ID NO: 119108 - protein, 27 aa, Artificial Sequence
  Cyclic GFR-binding peptide
NAISILYFIGKTPKILKKYRDEYDKVV

SEQ ID NO: 119109 - protein, 27 aa, Artificial Sequence
  Cyclic GFR-binding peptide
EPLTMLYYDEYDKVVEQLSNDEYDKVV

SEQ ID NO: 119110 - protein, 27 aa, Artificial Sequence
  Cyclic GFR-binding peptide
EPLPIVYYIGKTPKIEQLSNDEYDKVV

SEQ ID NO: 119111 - protein, 27 aa, Artificial Sequence
  Cyclic GFR-binding peptide
EPLTILYYVGRKPKVEQLSNDEYDKVV

SEQ ID NO: 119112 - protein, 27 aa, Artificial Sequence
  Cyclic GFR-binding peptide
EPLPIVYYVGRTPKVEQLSNDEYDKVV

SEQ ID NO: 119113 - protein, 27 aa, Artificial Sequence
  Cyclic GFR-binding peptide
NAISMLYFDEYDKVVLKKYRDEYDKVV

SEQ ID NO: 119114 - protein, 27 aa, Artificial Sequence
  Cyclic GFR-binding peptide
SPISVLFIDDSSNVIYKQYEDEYDKVV

SEQ ID NO: 119115 - protein, 27 aa, Artificial Sequence
  Cyclic GFR-binding peptide
SPISILFIVGRTPKVYKQYEDEYDKVV

SEQ ID NO: 119116 - protein, 27 aa, Artificial Sequence
  Cyclic GFR-binding peptide
EPLTMLYYDENEKVVEQLSNDEYDKVV

SEQ ID NO: 119117 - protein, 27 aa, Artificial Sequence
  Cyclic GFR-binding peptide
NAISILYFVGRTPKVLKKYRDEYDKVV

SEQ ID NO: 119118 - protein, 27 aa, Artificial Sequence
  Cyclic GFR-binding peptide
EPLTILYYDSANNVVEQLSNDEYDKVV

SEQ ID NO: 119119 - protein, 27 aa, Artificial Sequence
  Cyclic GFR-binding peptide
EPLPIVYYVGRKPKVEQLSNDEYDKVV

SEQ ID NO: 119120 - protein, 27 aa, Artificial Sequence
  Cyclic GFR-binding peptide
EPLPIVYYDSANNVVEQLSNDEYDKVV

SEQ ID NO: 119121 - protein, 27 aa, Artificial Sequence
  Cyclic GFR-binding peptide
EPLTILYYVGRTPKVEQLSNDEYDKVV

SEQ ID NO: 119122 - protein, 27 aa, Artificial Sequence
  Cyclic GFR-binding peptide
SAISILYLVGRTPKVLKNYQDEYDKVV

SEQ ID NO: 119123 - protein, 27 aa, Artificial Sequence
  Cyclic GFR-binding peptide
NAISMLYFDENEKVVLKKYRDEYDKVV

SEQ ID NO: 119124 - protein, 27 aa, Artificial Sequence
  Cyclic GFR-binding peptide
SPISILFIIGKTPKIYKQYEDEYDKVV

SEQ ID NO: 119125 - protein, 27 aa, Artificial Sequence
  Cyclic GFR-binding peptide
SPISILFIDSANNVVYKQYEDEYDKVV

SEQ ID NO: 119126 - protein, 27 aa, Artificial Sequence
  Cyclic GFR-binding peptide
NAISILYFVGRKPKVLKKYRDEYDKVV

SEQ ID NO: 119127 - protein, 27 aa, Artificial Sequence
  Cyclic GFR-binding peptide
EPLPVVYYDDSSNVIEQLSNDEYDKVV

SEQ ID NO: 119128 - protein, 27 aa, Artificial Sequence
  Cyclic GFR-binding peptide
EPLPMVYYDEYDKVVEQLSNDEYDKVV

SEQ ID NO: 119129 - protein, 27 aa, Artificial Sequence
  Cyclic GFR-binding peptide
SAISMLYLDENEKVVLKNYQDEYDKVV

SEQ ID NO: 119130 - protein, 27 aa, Artificial Sequence
  Cyclic GFR-binding peptide
SPISMLFIDENEKVVYKQYEDEYDKVV

SEQ ID NO: 119131 - protein, 27 aa, Artificial Sequence
  Cyclic GFR-binding peptide
SAISILYLVGRKPKVLKNYQDEYDKVV

SEQ ID NO: 119132 - protein, 27 aa, Artificial Sequence
  Cyclic GFR-binding peptide
NAISVLYFDDSSNVILKKYRDEYDKVV

SEQ ID NO: 119133 - protein, 27 aa, Artificial Sequence
  Cyclic GFR-binding peptide
EPLPMVYYDENEKVVEQLSNDEYDKVV

SEQ ID NO: 119134 - protein, 27 aa, Artificial Sequence
  Cyclic GFR-binding peptide
SPISMLFIDEYDKVVYKQYEDEYDKVV

SEQ ID NO: 119135 - protein, 27 aa, Artificial Sequence
  Cyclic GFR-binding peptide
SAISILYLDSANNVVLKNYQDEYDKVV

SEQ ID NO: 119136 - protein, 27 aa, Artificial Sequence
  Cyclic GFR-binding peptide
SAISILYLIGKTPKILKNYQDEYDKVV

SEQ ID NO: 119137 - protein, 27 aa, Artificial Sequence
  Cyclic GFR-binding peptide
EPLTILYYIGKTPKIEQLSNDEYDKVV

SEQ ID NO: 119138 - protein, 27 aa, Artificial Sequence
  Cyclic GFR-binding peptide
SPISILFIVGRKPKVYKQYEDEYDKVV

SEQ ID NO: 119139 - protein, 27 aa, Artificial Sequence
  Cyclic GFR-binding peptide
SAISMLYLDEYDKVVLKNYQDEYDKVV

SEQ ID NO: 119140 - protein, 27 aa, Artificial Sequence
  Cyclic GFR-binding peptide
NAISILYFDSANNVVLKKYRDEYDKVV

SEQ ID NO: 119141 - protein, 27 aa, Artificial Sequence
  Cyclic GFR-binding peptide
EPLTVLYYDDSSNVIEQLSNDEYDKVV

SEQ ID NO: 119142 - protein, 27 aa, Artificial Sequence
  Cyclic GFR-binding peptide
SAISVLYLDDSSNVILKNYQDEYDKVV

SEQ ID NO: 119143 - protein, 29 aa, Artificial Sequence
  Cyclic GFR-binding peptide
DEYDKVVVTAKKLKPKKRVYEIKRVQVPR

SEQ ID NO: 119144 - protein, 29 aa, Artificial Sequence
  Cyclic GFR-binding peptide
DEYDKVVVQVEKLKPKKRVYEVKAVKVSR

SEQ ID NO: 119145 - protein, 29 aa, Artificial Sequence
  Cyclic GFR-binding peptide
DEYDKVVVQVEKFIPKKRVIEVKAVKVSR

SEQ ID NO: 119146 - protein, 29 aa, Artificial Sequence
  Cyclic GFR-binding peptide
DEYDKVVVQVEKHQGQHPKIRVKAMKVSR

SEQ ID NO: 119147 - protein, 29 aa, Artificial Sequence
  Cyclic GFR-binding peptide
DEYDKVVVTAKKHQGQHPKIRIKRMQVPR

SEQ ID NO: 119148 - protein, 29 aa, Artificial Sequence
  Cyclic GFR-binding peptide
DEYDKVVSMEGLLKPKKRVYEMIQVTINS

SEQ ID NO: 119149 - protein, 29 aa, Artificial Sequence
  Cyclic GFR-binding peptide
DEYDKVVSMEGIFIPKKRVIEMIQVTINS

SEQ ID NO: 119150 - protein, 29 aa, Artificial Sequence
  Cyclic GFR-binding peptide
DEYDKVVSMEGLHQGQHPKIRMIQMTINS

SEQ ID NO: 119151 - protein, 29 aa, Artificial Sequence
  Cyclic GFR-binding peptide
DEYDKVVSMEGILKPKKRVYEMIQVTINS

SEQ ID NO: 119152 - protein, 29 aa, Artificial Sequence
  Cyclic GFR-binding peptide
DEYDKVVSMEGLFIPKKRVIEMIQVTINS

SEQ ID NO: 119153 - protein, 29 aa, Artificial Sequence
  Cyclic GFR-binding peptide
DEYDKVVVTAKKFIPKKRVIEIKRVQVPR

SEQ ID NO: 119154 - protein, 29 aa, Artificial Sequence
  Cyclic GFR-binding peptide
DEYDKVVSMEGIHQGQHPKIRMIQMTINS

SEQ ID NO: 119155 - protein, 29 aa, Artificial Sequence
  Cyclic GFR-binding peptide
RPVQVRKIEYVRKKPKLKKATVDEYDKVV

SEQ ID NO: 119156 - protein, 29 aa, Artificial Sequence
  Cyclic GFR-binding peptide
RSVKVAKVEYVRKKPKLKEVQVDEYDKVV

SEQ ID NO: 119157 - protein, 29 aa, Artificial Sequence
  Cyclic GFR-binding peptide
RSVKVAKVEIVRKKPIFKEVQVDEYDKVV

SEQ ID NO: 119158 - protein, 29 aa, Artificial Sequence
  Cyclic GFR-binding peptide
RSVKMAKVRIKPHQGQHKEVQVDEYDKVV

SEQ ID NO: 119159 - protein, 29 aa, Artificial Sequence
  Cyclic GFR-binding peptide
RPVQMRKIRIKPHQGQHKKATVDEYDKVV

SEQ ID NO: 119160 - protein, 29 aa, Artificial Sequence
  Cyclic GFR-binding peptide
SNITVQIMEYVRKKPKLLGEMSDEYDKVV

SEQ ID NO: 119161 - protein, 29 aa, Artificial Sequence
  Cyclic GFR-binding peptide
SNITVQIMEIVRKKPIFIGEMSDEYDKVV

SEQ ID NO: 119162 - protein, 29 aa, Artificial Sequence
  Cyclic GFR-binding peptide
SNITMQIMRIKPHQGQHLGEMSDEYDKVV

SEQ ID NO: 119163 - protein, 29 aa, Artificial Sequence
  Cyclic GFR-binding peptide
SNITVQIMEYVRKKPKLIGEMSDEYDKVV

SEQ ID NO: 119164 - protein, 29 aa, Artificial Sequence
  Cyclic GFR-binding peptide
SNITVQIMEIVRKKPIFLGEMSDEYDKVV

SEQ ID NO: 119165 - protein, 29 aa, Artificial Sequence
  Cyclic GFR-binding peptide
RPVQVRKIEIVRKKPIFKKATVDEYDKVV

SEQ ID NO: 119166 - protein, 29 aa, Artificial Sequence
  Cyclic GFR-binding peptide
SNITMQIMRIKPHQGQHIGEMSDEYDKVV

SEQ ID NO: 119167 - protein, 29 aa, Artificial Sequence
  Cyclic GFR-binding peptide
DEYDKVVVTAKKLKPKKRVYEIKRVQVPR

SEQ ID NO: 119168 - protein, 29 aa, Artificial Sequence
  Cyclic GFR-binding peptide
DEYDKVVVQVEKLKPKKRVYEVKAVKVSR

SEQ ID NO: 119169 - protein, 29 aa, Artificial Sequence
  Cyclic GFR-binding peptide
DEYDKVVVQVEKFIPKKRVIEVKAVKVSR

SEQ ID NO: 119170 - protein, 29 aa, Artificial Sequence
  Cyclic GFR-binding peptide
DEYDKVVVQVEKHQGQHPKIRVKAMKVSR

SEQ ID NO: 119171 - protein, 29 aa, Artificial Sequence
  Cyclic GFR-binding peptide
DEYDKVVVTAKKHQGQHPKIRIKRMQVPR

SEQ ID NO: 119172 - protein, 29 aa, Artificial Sequence
  Cyclic GFR-binding peptide
DEYDKVVSMEGLLKPKKRVYEMIQVTINS

SEQ ID NO: 119173 - protein, 29 aa, Artificial Sequence
  Cyclic GFR-binding peptide
DEYDKVVSMEGIFIPKKRVIEMIQVTINS

SEQ ID NO: 119174 - protein, 29 aa, Artificial Sequence
  Cyclic GFR-binding peptide
DEYDKVVSMEGLHQGQHPKIRMIQMTINS

SEQ ID NO: 119175 - protein, 29 aa, Artificial Sequence
  Cyclic GFR-binding peptide
DEYDKVVSMEGILKPKKRVYEMIQVTINS

SEQ ID NO: 119176 - protein, 29 aa, Artificial Sequence
  Cyclic GFR-binding peptide
DEYDKVVSMEGLFIPKKRVIEMIQVTINS

SEQ ID NO: 119177 - protein, 29 aa, Artificial Sequence
  Cyclic GFR-binding peptide
DEYDKVVVTAKKFIPKKRVIEIKRVQVPR

SEQ ID NO: 119178 - protein, 29 aa, Artificial Sequence
  Cyclic GFR-binding peptide
DEYDKVVSMEGIHQGQHPKIRMIQMTINS

SEQ ID NO: 119179 - protein, 29 aa, Artificial Sequence
  Cyclic GFR-binding peptide
RPVQVRKIEYVRKKPKLKKATVDEYDKVV

SEQ ID NO: 119180 - protein, 29 aa, Artificial Sequence
  Cyclic GFR-binding peptide
RSVKVAKVEYVRKKPKLKEVQVDEYDKVV

SEQ ID NO: 119181 - protein, 29 aa, Artificial Sequence
  Cyclic GFR-binding peptide
RSVKVAKVEIVRKKPIFKEVQVDEYDKVV

SEQ ID NO: 119182 - protein, 29 aa, Artificial Sequence
  Cyclic GFR-binding peptide
RSVKMAKVRIKPHQGQHKEVQVDEYDKVV

SEQ ID NO: 119183 - protein, 29 aa, Artificial Sequence
  Cyclic GFR-binding peptide
RPVQMRKIRIKPHQGQHKKATVDEYDKVV

SEQ ID NO: 119184 - protein, 29 aa, Artificial Sequence
  Cyclic GFR-binding peptide
SNITVQIMEYVRKKPKLLGEMSDEYDKVV

SEQ ID NO: 119185 - protein, 29 aa, Artificial Sequence
  Cyclic GFR-binding peptide
SNITVQIMEIVRKKPIFIGEMSDEYDKVV

SEQ ID NO: 119186 - protein, 29 aa, Artificial Sequence
  Cyclic GFR-binding peptide
SNITMQIMRIKPHQGQHLGEMSDEYDKVV

SEQ ID NO: 119187 - protein, 29 aa, Artificial Sequence
  Cyclic GFR-binding peptide
SNITVQIMEYVRKKPKLIGEMSDEYDKVV

SEQ ID NO: 119188 - protein, 29 aa, Artificial Sequence
  Cyclic GFR-binding peptide
SNITVQIMEIVRKKPIFLGEMSDEYDKVV

SEQ ID NO: 119189 - protein, 29 aa, Artificial Sequence
  Cyclic GFR-binding peptide
RPVQVRKIEIVRKKPIFKKATVDEYDKVV

SEQ ID NO: 119190 - protein, 29 aa, Artificial Sequence
  Cyclic GFR-binding peptide
SNITMQIMRIKPHQGQHIGEMSDEYDKVV

SEQ ID NO: 119191 - protein, 27 aa, Artificial Sequence
  Cyclic GFR-binding peptide
DEYDKVVEYQKYVVKENEDIYLMSIPS

SEQ ID NO: 119192 - protein, 27 aa, Artificial Sequence
  Cyclic GFR-binding peptide
DEYDKVVRYKKLIKPTKGIFYLISIAN

SEQ ID NO: 119193 - protein, 27 aa, Artificial Sequence
  Cyclic GFR-binding peptide
DEYDKVVEYKFKVKPTRGVLYLISIPE

SEQ ID NO: 119194 - protein, 27 aa, Artificial Sequence
  Cyclic GFR-binding peptide
DEYDKVVYHYKLVVKDYEDKYLMSIPS

SEQ ID NO: 119195 - protein, 27 aa, Artificial Sequence
  Cyclic GFR-binding peptide
DEYDKVVEYKFKTPVGMDDLYLVSIPE

SEQ ID NO: 119196 - protein, 27 aa, Artificial Sequence
  Cyclic GFR-binding peptide
DEYDKVVEYQKYVKPKRGVIYLISIPS

SEQ ID NO: 119197 - protein, 27 aa, Artificial Sequence
  Cyclic GFR-binding peptide
DEYDKVVRYKKLVVKDYEDFYLMSIAN

SEQ ID NO: 119198 - protein, 27 aa, Artificial Sequence
  Cyclic GFR-binding peptide
DEYDKVVEYQKYVVKDYEDIYLMSIPS

SEQ ID NO: 119199 - protein, 27 aa, Artificial Sequence
  Cyclic GFR-binding peptide
DEYDKVVRYKKLVKPTRGVFYLISIAN

SEQ ID NO: 119200 - protein, 27 aa, Artificial Sequence
  Cyclic GFR-binding peptide
DEYDKVVYHYKLIKPTKGIKYLISIPS

SEQ ID NO: 119201 - protein, 27 aa, Artificial Sequence
  Cyclic GFR-binding peptide
DEYDKVVYHYKLVVKENEDKYLMSIPS

SEQ ID NO: 119202 - protein, 27 aa, Artificial Sequence
  Cyclic GFR-binding peptide
DEYDKVVYHYKLVKPKRGVKYLISIPS

SEQ ID NO: 119203 - protein, 27 aa, Artificial Sequence
  Cyclic GFR-binding peptide
DEYDKVVEYKFKIKPTKGILYLISIPE

SEQ ID NO: 119204 - protein, 27 aa, Artificial Sequence
  Cyclic GFR-binding peptide
DEYDKVVEYQKYIKPTKGIIYLISIPS

SEQ ID NO: 119205 - protein, 27 aa, Artificial Sequence
  Cyclic GFR-binding peptide
DEYDKVVRYKKLVVKENEDFYLMSIAN

SEQ ID NO: 119206 - protein, 27 aa, Artificial Sequence
  Cyclic GFR-binding peptide
DEYDKVVRYKKLVVNNAADFYLISIAN

SEQ ID NO: 119207 - protein, 27 aa, Artificial Sequence
  Cyclic GFR-binding peptide
DEYDKVVYHYKLYTVVGKDKYLISIPS

SEQ ID NO: 119208 - protein, 27 aa, Artificial Sequence
  Cyclic GFR-binding peptide
DEYDKVVRYKKLTPVGMDDFYLVSIAN

SEQ ID NO: 119209 - protein, 27 aa, Artificial Sequence
  Cyclic GFR-binding peptide
DEYDKVVRYKKLVKPKRGVFYLISIAN

SEQ ID NO: 119210 - protein, 27 aa, Artificial Sequence
  Cyclic GFR-binding peptide
DEYDKVVYHYKLVVNNAADKYLISIPS

SEQ ID NO: 119211 - protein, 27 aa, Artificial Sequence
  Cyclic GFR-binding peptide
DEYDKVVYHYKLIVNSSDDKYLVSIPS

SEQ ID NO: 119212 - protein, 27 aa, Artificial Sequence
  Cyclic GFR-binding peptide
DEYDKVVRYKKLIVNNSSDFYLVSIAN

SEQ ID NO: 119213 - protein, 27 aa, Artificial Sequence
  Cyclic GFR-binding peptide
DEYDKVVRYKKLYTVVGKDFYLISIAN

SEQ ID NO: 119214 - protein, 27 aa, Artificial Sequence
  Cyclic GFR-binding peptide
DEYDKVVEYQKYVVNNAADIYLISIPS

SEQ ID NO: 119215 - protein, 27 aa, Artificial Sequence
  Cyclic GFR-binding peptide
DEYDKVVRYKKLIVNSSDDFYLVSIAN

SEQ ID NO: 119216 - protein, 27 aa, Artificial Sequence
  Cyclic GFR-binding peptide
DEYDKVVEYKFKIVNNSSDLYLVSIPE

SEQ ID NO: 119217 - protein, 27 aa, Artificial Sequence
  Cyclic GFR-binding peptide
DEYDKVVEYQKYVKPTRGVIYLISIPS

SEQ ID NO: 119218 - protein, 27 aa, Artificial Sequence
  Cyclic GFR-binding peptide
DEYDKVVEYQKYIVNSSDDIYLVSIPS

SEQ ID NO: 119219 - protein, 27 aa, Artificial Sequence
  Cyclic GFR-binding peptide
DEYDKVVYHYKLTPVGMDDKYLVSIPS

SEQ ID NO: 119220 - protein, 27 aa, Artificial Sequence
  Cyclic GFR-binding peptide
DEYDKVVYHYKLIVNNSSDKYLVSIPS

SEQ ID NO: 119221 - protein, 27 aa, Artificial Sequence
  Cyclic GFR-binding peptide
DEYDKVVEYKFKIVNSSDDLYLVSIPE

SEQ ID NO: 119222 - protein, 27 aa, Artificial Sequence
  Cyclic GFR-binding peptide
DEYDKVVYHYKLVKPTRGVKYLISIPS

SEQ ID NO: 119223 - protein, 27 aa, Artificial Sequence
  Cyclic GFR-binding peptide
DEYDKVVEYKFKVKPKRGVLYLISIPE

SEQ ID NO: 119224 - protein, 27 aa, Artificial Sequence
  Cyclic GFR-binding peptide
DEYDKVVEYQKYYTVVGKDIYLISIPS

SEQ ID NO: 119225 - protein, 27 aa, Artificial Sequence
  Cyclic GFR-binding peptide
DEYDKVVEYKFKVVKENEDLYLMSIPE

SEQ ID NO: 119226 - protein, 27 aa, Artificial Sequence
  Cyclic GFR-binding peptide
DEYDKVVEYQKYTPVGMDDIYLVSIPS

SEQ ID NO: 119227 - protein, 27 aa, Artificial Sequence
  Cyclic GFR-binding peptide
DEYDKVVEYQKYIVNNSSDIYLVSIPS

SEQ ID NO: 119228 - protein, 27 aa, Artificial Sequence
  Cyclic GFR-binding peptide
DEYDKVVEYKFKVVKDYEDLYLMSIPE

SEQ ID NO: 119229 - protein, 27 aa, Artificial Sequence
  Cyclic GFR-binding peptide
DEYDKVVEYKFKYTVVGKDLYLISIPE

SEQ ID NO: 119230 - protein, 27 aa, Artificial Sequence
  Cyclic GFR-binding peptide
DEYDKVVEYKFKVVNNAADLYLISIPE

SEQ ID NO: 119231 - protein, 27 aa, Artificial Sequence
  Cyclic GFR-binding peptide
SPISMLYIDENEKVVYKQYEDEYDKVV

SEQ ID NO: 119232 - protein, 27 aa, Artificial Sequence
  Cyclic GFR-binding peptide
NAISILYFIGKTPKILKKYRDEYDKVV

SEQ ID NO: 119233 - protein, 27 aa, Artificial Sequence
  Cyclic GFR-binding peptide
EPISILYLVGRTPKVKFKYEDEYDKVV

SEQ ID NO: 119234 - protein, 27 aa, Artificial Sequence
  Cyclic GFR-binding peptide
SPISMLYKDEYDKVVLKYHYDEYDKVV

SEQ ID NO: 119235 - protein, 27 aa, Artificial Sequence
  Cyclic GFR-binding peptide
EPISVLYLDDMGVPTKFKYEDEYDKVV

SEQ ID NO: 119236 - protein, 27 aa, Artificial Sequence
  Cyclic GFR-binding peptide
SPISILYIVGRKPKVYKQYEDEYDKVV

SEQ ID NO: 119237 - protein, 27 aa, Artificial Sequence
  Cyclic GFR-binding peptide
NAISMLYFDEYDKVVLKKYRDEYDKVV

SEQ ID NO: 119238 - protein, 27 aa, Artificial Sequence
  Cyclic GFR-binding peptide
SPISMLYIDEYDKVVYKQYEDEYDKVV

SEQ ID NO: 119239 - protein, 27 aa, Artificial Sequence
  Cyclic GFR-binding peptide
NAISILYFVGRTPKVLKKYRDEYDKVV

SEQ ID NO: 119240 - protein, 27 aa, Artificial Sequence
  Cyclic GFR-binding peptide
SPISILYKIGKTPKILKYHYDEYDKVV

SEQ ID NO: 119241 - protein, 27 aa, Artificial Sequence
  Cyclic GFR-binding peptide
SPISMLYKDENEKVVLKYHYDEYDKVV

SEQ ID NO: 119242 - protein, 27 aa, Artificial Sequence
  Cyclic GFR-binding peptide
SPISILYKVGRKPKVLKYHYDEYDKVV

SEQ ID NO: 119243 - protein, 27 aa, Artificial Sequence
  Cyclic GFR-binding peptide
EPISILYLIGKTPKIKFKYEDEYDKVV

SEQ ID NO: 119244 - protein, 27 aa, Artificial Sequence
  Cyclic GFR-binding peptide
SPISILYIIGKTPKIYKQYEDEYDKVV

SEQ ID NO: 119245 - protein, 27 aa, Artificial Sequence
  Cyclic GFR-binding peptide
NAISMLYFDENEKVVLKKYRDEYDKVV

SEQ ID NO: 119246 - protein, 27 aa, Artificial Sequence
  Cyclic GFR-binding peptide
NAISILYFDAANNVVLKKYRDEYDKVV

SEQ ID NO: 119247 - protein, 27 aa, Artificial Sequence
  Cyclic GFR-binding peptide
SPISILYKDKGVVTYLKYHYDEYDKVV

SEQ ID NO: 119248 - protein, 27 aa, Artificial Sequence
  Cyclic GFR-binding peptide
NAISVLYFDDMGVPTLKKYRDEYDKVV

SEQ ID NO: 119249 - protein, 27 aa, Artificial Sequence
  Cyclic GFR-binding peptide
NAISILYFVGRKPKVLKKYRDEYDKVV

SEQ ID NO: 119250 - protein, 27 aa, Artificial Sequence
  Cyclic GFR-binding peptide
SPISILYKDAANNVVLKYHYDEYDKVV

SEQ ID NO: 119251 - protein, 27 aa, Artificial Sequence
  Cyclic GFR-binding peptide
SPISVLYKDDSSNVILKYHYDEYDKVV

SEQ ID NO: 119252 - protein, 27 aa, Artificial Sequence
  Cyclic GFR-binding peptide
NAISVLYFDSSNNVILKKYRDEYDKVV

SEQ ID NO: 119253 - protein, 27 aa, Artificial Sequence
  Cyclic GFR-binding peptide
NAISILYFDKGVVTYLKKYRDEYDKVV

SEQ ID NO: 119254 - protein, 27 aa, Artificial Sequence
  Cyclic GFR-binding peptide
SPISILYIDAANNVVYKQYEDEYDKVV

SEQ ID NO: 119255 - protein, 27 aa, Artificial Sequence
  Cyclic GFR-binding peptide
NAISVLYFDDSSNVILKKYRDEYDKVV

SEQ ID NO: 119256 - protein, 27 aa, Artificial Sequence
  Cyclic GFR-binding peptide
EPISVLYLDSSNNVIKFKYEDEYDKVV

SEQ ID NO: 119257 - protein, 27 aa, Artificial Sequence
  Cyclic GFR-binding peptide
SPISILYIVGRTPKVYKQYEDEYDKVV

SEQ ID NO: 119258 - protein, 27 aa, Artificial Sequence
  Cyclic GFR-binding peptide
SPISVLYIDDSSNVIYKQYEDEYDKVV

SEQ ID NO: 119259 - protein, 27 aa, Artificial Sequence
  Cyclic GFR-binding peptide
SPISVLYKDDMGVPTLKYHYDEYDKVV

SEQ ID NO: 119260 - protein, 27 aa, Artificial Sequence
  Cyclic GFR-binding peptide
SPISVLYKDSSNNVILKYHYDEYDKVV

SEQ ID NO: 119261 - protein, 27 aa, Artificial Sequence
  Cyclic GFR-binding peptide
EPISVLYLDDSSNVIKFKYEDEYDKVV

SEQ ID NO: 119262 - protein, 27 aa, Artificial Sequence
  Cyclic GFR-binding peptide
SPISILYKVGRTPKVLKYHYDEYDKVV

SEQ ID NO: 119263 - protein, 27 aa, Artificial Sequence
  Cyclic GFR-binding peptide
EPISILYLVGRKPKVKFKYEDEYDKVV

SEQ ID NO: 119264 - protein, 27 aa, Artificial Sequence
  Cyclic GFR-binding peptide
SPISILYIDKGVVTYYKQYEDEYDKVV

SEQ ID NO: 119265 - protein, 27 aa, Artificial Sequence
  Cyclic GFR-binding peptide
EPISMLYLDENEKVVKFKYEDEYDKVV

SEQ ID NO: 119266 - protein, 27 aa, Artificial Sequence
  Cyclic GFR-binding peptide
SPISVLYIDDMGVPTYKQYEDEYDKVV

SEQ ID NO: 119267 - protein, 27 aa, Artificial Sequence
  Cyclic GFR-binding peptide
SPISVLYIDSSNNVIYKQYEDEYDKVV

SEQ ID NO: 119268 - protein, 27 aa, Artificial Sequence
  Cyclic GFR-binding peptide
EPISMLYLDEYDKVVKFKYEDEYDKVV

SEQ ID NO: 119269 - protein, 27 aa, Artificial Sequence
  Cyclic GFR-binding peptide
EPISILYLDKGVVTYKFKYEDEYDKVV

SEQ ID NO: 119270 - protein, 27 aa, Artificial Sequence
  Cyclic GFR-binding peptide
EPISILYLDAANNVVKFKYEDEYDKVV

SEQ ID NO: 119271 - protein, 27 aa, Artificial Sequence
  Cyclic GFR-binding peptide
DEYDKVVPIKGYIIQQKDNFYLMNIPS

SEQ ID NO: 119272 - protein, 27 aa, Artificial Sequence
  Cyclic GFR-binding peptide
DEYDKVVPIKGYVVKDYEDFYLMNIPS

SEQ ID NO: 119273 - protein, 27 aa, Artificial Sequence
  Cyclic GFR-binding peptide
DEYDKVVPIKGYIVNSSDDFYLVNIPS

SEQ ID NO: 119274 - protein, 27 aa, Artificial Sequence
  Cyclic GFR-binding peptide
DEYDKVVPIKGYLLVRGNDFYLMNIPS

SEQ ID NO: 119275 - protein, 27 aa, Artificial Sequence
  Cyclic GFR-binding peptide
DEYDKVVPIKGYVVNNAADFYLINIPS

SEQ ID NO: 119276 - protein, 27 aa, Artificial Sequence
  Cyclic GFR-binding peptide
DEYDKVVPIKGYVVKENEDFYLMNIPS

SEQ ID NO: 119277 - protein, 27 aa, Artificial Sequence
  Cyclic GFR-binding peptide
DEYDKVVPIKGYVVNNASDFYLINIPS

SEQ ID NO: 119278 - protein, 27 aa, Artificial Sequence
  Cyclic GFR-binding peptide
DEYDKVVPIKGYYTVVGKDFYLINIPS

SEQ ID NO: 119279 - protein, 27 aa, Artificial Sequence
  Cyclic GFR-binding peptide
DEYDKVVPIKGYTPVGMDDFYLVNIPS

SEQ ID NO: 119280 - protein, 27 aa, Artificial Sequence
  Cyclic GFR-binding peptide
DEYDKVVPIKGYIVNNSSDFYLVNIPS

SEQ ID NO: 119281 - protein, 27 aa, Artificial Sequence
  Cyclic GFR-binding peptide
SPINMLYFNDKQQIIYGKIPDEYDKVV

SEQ ID NO: 119282 - protein, 27 aa, Artificial Sequence
  Cyclic GFR-binding peptide
SPINMLYFDEYDKVVYGKIPDEYDKVV

SEQ ID NO: 119283 - protein, 27 aa, Artificial Sequence
  Cyclic GFR-binding peptide
SPINVLYFDDSSNVIYGKIPDEYDKVV

SEQ ID NO: 119284 - protein, 27 aa, Artificial Sequence
  Cyclic GFR-binding peptide
SPINMLYFDNGRVLLYGKIPDEYDKVV

SEQ ID NO: 119285 - protein, 27 aa, Artificial Sequence
  Cyclic GFR-binding peptide
SPINILYFDAANNVVYGKIPDEYDKVV

SEQ ID NO: 119286 - protein, 27 aa, Artificial Sequence
  Cyclic GFR-binding peptide
SPINMLYFDENEKVVYGKIPDEYDKVV

SEQ ID NO: 119287 - protein, 27 aa, Artificial Sequence
  Cyclic GFR-binding peptide
SPINILYFDSANNVVYGKIPDEYDKVV

SEQ ID NO: 119288 - protein, 27 aa, Artificial Sequence
  Cyclic GFR-binding peptide
SPINILYFDKGVVTYYGKIPDEYDKVV

SEQ ID NO: 119289 - protein, 27 aa, Artificial Sequence
  Cyclic GFR-binding peptide
SPINVLYFDDMGVPTYGKIPDEYDKVV

SEQ ID NO: 119290 - protein, 27 aa, Artificial Sequence
  Cyclic GFR-binding peptide
SPINVLYFDSSNNVIYGKIPDEYDKVV

SEQ ID NO: 119291 - protein, 27 aa, Artificial Sequence
  Cyclic GFR-binding peptide
DEYDKVVPIKGYIIQQKDNFYLMNIPS

SEQ ID NO: 119292 - protein, 27 aa, Artificial Sequence
  Cyclic GFR-binding peptide
DEYDKVVPIKGYVVKDYEDFYLMNIPS

SEQ ID NO: 119293 - protein, 27 aa, Artificial Sequence
  Cyclic GFR-binding peptide
DEYDKVVPIKGYIVNSSDDFYLVNIPS

SEQ ID NO: 119294 - protein, 27 aa, Artificial Sequence
  Cyclic GFR-binding peptide
DEYDKVVPIKGYLLVRGNDFYLMNIPS

SEQ ID NO: 119295 - protein, 27 aa, Artificial Sequence
  Cyclic GFR-binding peptide
DEYDKVVPIKGYVVNNAADFYLINIPS

SEQ ID NO: 119296 - protein, 27 aa, Artificial Sequence
  Cyclic GFR-binding peptide
DEYDKVVPIKGYVVKENEDFYLMNIPS

SEQ ID NO: 119297 - protein, 27 aa, Artificial Sequence
  Cyclic GFR-binding peptide
DEYDKVVPIKGYVVNNASDFYLINIPS

SEQ ID NO: 119298 - protein, 27 aa, Artificial Sequence
  Cyclic GFR-binding peptide
DEYDKVVPIKGYYTVVGKDFYLINIPS

SEQ ID NO: 119299 - protein, 27 aa, Artificial Sequence
  Cyclic GFR-binding peptide
DEYDKVVPIKGYTPVGMDDFYLVNIPS

SEQ ID NO: 119300 - protein, 27 aa, Artificial Sequence
  Cyclic GFR-binding peptide
DEYDKVVPIKGYIVNNSSDFYLVNIPS

SEQ ID NO: 119301 - protein, 27 aa, Artificial Sequence
  Cyclic GFR-binding peptide
SPINMLYFNDKQQIIYGKIPDEYDKVV

SEQ ID NO: 119302 - protein, 27 aa, Artificial Sequence
  Cyclic GFR-binding peptide
SPINMLYFDEYDKVVYGKIPDEYDKVV

SEQ ID NO: 119303 - protein, 27 aa, Artificial Sequence
  Cyclic GFR-binding peptide
SPINVLYFDDSSNVIYGKIPDEYDKVV

SEQ ID NO: 119304 - protein, 27 aa, Artificial Sequence
  Cyclic GFR-binding peptide
SPINMLYFDNGRVLLYGKIPDEYDKVV

SEQ ID NO: 119305 - protein, 27 aa, Artificial Sequence
  Cyclic GFR-binding peptide
SPINILYFDAANNVVYGKIPDEYDKVV

SEQ ID NO: 119306 - protein, 27 aa, Artificial Sequence
  Cyclic GFR-binding peptide
SPINMLYFDENEKVVYGKIPDEYDKVV

SEQ ID NO: 119307 - protein, 27 aa, Artificial Sequence
  Cyclic GFR-binding peptide
SPINILYFDSANNVVYGKIPDEYDKVV

SEQ ID NO: 119308 - protein, 27 aa, Artificial Sequence
  Cyclic GFR-binding peptide
SPINILYFDKGVVTYYGKIPDEYDKVV

SEQ ID NO: 119309 - protein, 27 aa, Artificial Sequence
  Cyclic GFR-binding peptide
SPINVLYFDDMGVPTYGKIPDEYDKVV

SEQ ID NO: 119310 - protein, 27 aa, Artificial Sequence
  Cyclic GFR-binding peptide
SPINVLYFDSSNNVIYGKIPDEYDKVV

SEQ ID NO: 119311 - protein, 27 aa, Artificial Sequence
  Cyclic GFR-binding peptide
DEYDKVVRYKKLIKPTKGIFYLISIAN

SEQ ID NO: 119312 - protein, 27 aa, Artificial Sequence
  Cyclic GFR-binding peptide
DEYDKVVRYKKLVVKDYEDFYLMSIAN

SEQ ID NO: 119313 - protein, 27 aa, Artificial Sequence
  Cyclic GFR-binding peptide
DEYDKVVRYKKLVKPTRGVFYLISIAN

SEQ ID NO: 119314 - protein, 27 aa, Artificial Sequence
  Cyclic GFR-binding peptide
DEYDKVVRYKKLVVKENEDFYLMSIAN

SEQ ID NO: 119315 - protein, 27 aa, Artificial Sequence
  Cyclic GFR-binding peptide
DEYDKVVRYKKLVKPKRGVFYLISIAN

SEQ ID NO: 119316 - protein, 27 aa, Artificial Sequence
  Cyclic GFR-binding peptide
DEYDKVVRYKKLIVNSSDDFYLVSIAN

SEQ ID NO: 119317 - protein, 27 aa, Artificial Sequence
  Cyclic GFR-binding peptide
DEYDKVVRYKKLVVNNASDFYLISIAN

SEQ ID NO: 119318 - protein, 27 aa, Artificial Sequence
  Cyclic GFR-binding peptide
NAISILYFIGKTPKILKKYRDEYDKVV

SEQ ID NO: 119319 - protein, 27 aa, Artificial Sequence
  Cyclic GFR-binding peptide
NAISMLYFDEYDKVVLKKYRDEYDKVV

SEQ ID NO: 119320 - protein, 27 aa, Artificial Sequence
  Cyclic GFR-binding peptide
NAISILYFVGRTPKVLKKYRDEYDKVV

SEQ ID NO: 119321 - protein, 27 aa, Artificial Sequence
  Cyclic GFR-binding peptide
NAISMLYFDENEKVVLKKYRDEYDKVV

SEQ ID NO: 119322 - protein, 27 aa, Artificial Sequence
  Cyclic GFR-binding peptide
NAISILYFVGRKPKVLKKYRDEYDKVV

SEQ ID NO: 119323 - protein, 27 aa, Artificial Sequence
  Cyclic GFR-binding peptide
NAISVLYFDDSSNVILKKYRDEYDKVV

SEQ ID NO: 119324 - protein, 27 aa, Artificial Sequence
  Cyclic GFR-binding peptide
NAISILYFDSANNVVLKKYRDEYDKVV

SEQ ID NO: 119325 - protein, 27 aa, Artificial Sequence
  Cyclic GFR-binding peptide
DEYDKVVEYQKYVVKENEDIYLMSIPS

SEQ ID NO: 119326 - protein, 27 aa, Artificial Sequence
  Cyclic GFR-binding peptide
DEYDKVVNSLQEVVKDYEDYYLMTLPE

SEQ ID NO: 119327 - protein, 27 aa, Artificial Sequence
  Cyclic GFR-binding peptide
DEYDKVVEYQKYVVKENEDIFLMSIPS

SEQ ID NO: 119328 - protein, 27 aa, Artificial Sequence
  Cyclic GFR-binding peptide
DEYDKVVNSLQEIKPTKGIYYVIPLPE

SEQ ID NO: 119329 - protein, 27 aa, Artificial Sequence
  Cyclic GFR-binding peptide
DEYDKVVNSLQEVKPKRGVYYLITLPE

SEQ ID NO: 119330 - protein, 27 aa, Artificial Sequence
  Cyclic GFR-binding peptide
DEYDKVVEYQKYVVNNAADIYLISIPS

SEQ ID NO: 119331 - protein, 27 aa, Artificial Sequence
  Cyclic GFR-binding peptide
DEYDKVVNSLQEVKPTRGVYYVIPLPE

SEQ ID NO: 119332 - protein, 27 aa, Artificial Sequence
  Cyclic GFR-binding peptide
DEYDKVVEYQKYIVNSSDDIFLVSIPS

SEQ ID NO: 119333 - protein, 27 aa, Artificial Sequence
  Cyclic GFR-binding peptide
DEYDKVVEYQKYVKPTRGVIFLISIPS

SEQ ID NO: 119334 - protein, 27 aa, Artificial Sequence
  Cyclic GFR-binding peptide
DEYDKVVEYQKYVVKDYEDIYLMSIPS

SEQ ID NO: 119335 - protein, 27 aa, Artificial Sequence
  Cyclic GFR-binding peptide
DEYDKVVNSLQEVVKENEDYYLMTLPE

SEQ ID NO: 119336 - protein, 27 aa, Artificial Sequence
  Cyclic GFR-binding peptide
DEYDKVVNSLQEVVNNASDYYLITLPE

SEQ ID NO: 119337 - protein, 27 aa, Artificial Sequence
  Cyclic GFR-binding peptide
DEYDKVVNSLQEVKPKRGVYYVIPLPE

SEQ ID NO: 119338 - protein, 27 aa, Artificial Sequence
  Cyclic GFR-binding peptide
DEYDKVVEYQKYIVNSSDDIYLVSIPS

SEQ ID NO: 119339 - protein, 27 aa, Artificial Sequence
  Cyclic GFR-binding peptide
DEYDKVVNSLQEVVKENEDYYVMPLPE

SEQ ID NO: 119340 - protein, 27 aa, Artificial Sequence
  Cyclic GFR-binding peptide
DEYDKVVEYQKYVVKDYEDIFLMSIPS

SEQ ID NO: 119341 - protein, 27 aa, Artificial Sequence
  Cyclic GFR-binding peptide
DEYDKVVNSLQEVVNNASDYYVIPLPE

SEQ ID NO: 119342 - protein, 27 aa, Artificial Sequence
  Cyclic GFR-binding peptide
DEYDKVVEYQKYVVNNASDIYLISIPS

SEQ ID NO: 119343 - protein, 27 aa, Artificial Sequence
  Cyclic GFR-binding peptide
DEYDKVVNSLQEVKPTRGVYYLITLPE

SEQ ID NO: 119344 - protein, 27 aa, Artificial Sequence
  Cyclic GFR-binding peptide
DEYDKVVEYQKYYTVVGKDIYLISIPS

SEQ ID NO: 119345 - protein, 27 aa, Artificial Sequence
  Cyclic GFR-binding peptide
DEYDKVVEYQKYIIQQKDNIYLMSIPS

SEQ ID NO: 119346 - protein, 27 aa, Artificial Sequence
  Cyclic GFR-binding peptide
DEYDKVVEYQKYTPVGMDDIYLVSIPS

SEQ ID NO: 119347 - protein, 27 aa, Artificial Sequence
  Cyclic GFR-binding peptide
DEYDKVVEYQKYIKPTKGIIFLISIPS

SEQ ID NO: 119348 - protein, 27 aa, Artificial Sequence
  Cyclic GFR-binding peptide
DEYDKVVEYQKYIVNNSSDIYLVSIPS

SEQ ID NO: 119349 - protein, 27 aa, Artificial Sequence
  Cyclic GFR-binding peptide
DEYDKVVNSLQEIKPTKGIYYLITLPE

SEQ ID NO: 119350 - protein, 27 aa, Artificial Sequence
  Cyclic GFR-binding peptide
DEYDKVVEYQKYVVNNASDIFLISIPS

SEQ ID NO: 119351 - protein, 27 aa, Artificial Sequence
  Cyclic GFR-binding peptide
DEYDKVVEYQKYVKPKRGVIFLISIPS

SEQ ID NO: 119352 - protein, 27 aa, Artificial Sequence
  Cyclic GFR-binding peptide
DEYDKVVNSLQEIVNSSDDYYVVPLPE

SEQ ID NO: 119353 - protein, 27 aa, Artificial Sequence
  Cyclic GFR-binding peptide
DEYDKVVNSLQEVVKDYEDYYVMPLPE

SEQ ID NO: 119354 - protein, 27 aa, Artificial Sequence
  Cyclic GFR-binding peptide
DEYDKVVEYQKYLLVRGNDIYLMSIPS

SEQ ID NO: 119355 - protein, 27 aa, Artificial Sequence
  Cyclic GFR-binding peptide
DEYDKVVNSLQEIVNSSDDYYLVTLPE

SEQ ID NO: 119356 - protein, 27 aa, Artificial Sequence
  Cyclic GFR-binding peptide
SPISMLYIDENEKVVYKQYEDEYDKVV

SEQ ID NO: 119357 - protein, 27 aa, Artificial Sequence
  Cyclic GFR-binding peptide
EPLTMLYYDEYDKVVEQLSNDEYDKVV

SEQ ID NO: 119358 - protein, 27 aa, Artificial Sequence
  Cyclic GFR-binding peptide
SPISMLFIDENEKVVYKQYEDEYDKVV

SEQ ID NO: 119359 - protein, 27 aa, Artificial Sequence
  Cyclic GFR-binding peptide
EPLPIVYYIGKTPKIEQLSNDEYDKVV

SEQ ID NO: 119360 - protein, 27 aa, Artificial Sequence
  Cyclic GFR-binding peptide
EPLTILYYVGRKPKVEQLSNDEYDKVV

SEQ ID NO: 119361 - protein, 27 aa, Artificial Sequence
  Cyclic GFR-binding peptide
SPISILYIDAANNVVYKQYEDEYDKVV

SEQ ID NO: 119362 - protein, 27 aa, Artificial Sequence
  Cyclic GFR-binding peptide
EPLPIVYYVGRTPKVEQLSNDEYDKVV

SEQ ID NO: 119363 - protein, 27 aa, Artificial Sequence
  Cyclic GFR-binding peptide
SPISVLFIDDSSNVIYKQYEDEYDKVV

SEQ ID NO: 119364 - protein, 27 aa, Artificial Sequence
  Cyclic GFR-binding peptide
SPISILFIVGRTPKVYKQYEDEYDKVV

SEQ ID NO: 119365 - protein, 27 aa, Artificial Sequence
  Cyclic GFR-binding peptide
SPISMLYIDEYDKVVYKQYEDEYDKVV

SEQ ID NO: 119366 - protein, 27 aa, Artificial Sequence
  Cyclic GFR-binding peptide
EPLTMLYYDENEKVVEQLSNDEYDKVV

SEQ ID NO: 119367 - protein, 27 aa, Artificial Sequence
  Cyclic GFR-binding peptide
EPLTILYYDSANNVVEQLSNDEYDKVV

SEQ ID NO: 119368 - protein, 27 aa, Artificial Sequence
  Cyclic GFR-binding peptide
EPLPIVYYVGRKPKVEQLSNDEYDKVV

SEQ ID NO: 119369 - protein, 27 aa, Artificial Sequence
  Cyclic GFR-binding peptide
SPISVLYIDDSSNVIYKQYEDEYDKVV

SEQ ID NO: 119370 - protein, 27 aa, Artificial Sequence
  Cyclic GFR-binding peptide
EPLPMVYYDENEKVVEQLSNDEYDKVV

SEQ ID NO: 119371 - protein, 27 aa, Artificial Sequence
  Cyclic GFR-binding peptide
SPISMLFIDEYDKVVYKQYEDEYDKVV

SEQ ID NO: 119372 - protein, 27 aa, Artificial Sequence
  Cyclic GFR-binding peptide
EPLPIVYYDSANNVVEQLSNDEYDKVV

SEQ ID NO: 119373 - protein, 27 aa, Artificial Sequence
  Cyclic GFR-binding peptide
SPISILYIDSANNVVYKQYEDEYDKVV

SEQ ID NO: 119374 - protein, 27 aa, Artificial Sequence
  Cyclic GFR-binding peptide
EPLTILYYVGRTPKVEQLSNDEYDKVV

SEQ ID NO: 119375 - protein, 27 aa, Artificial Sequence
  Cyclic GFR-binding peptide
SPISILYIDKGVVTYYKQYEDEYDKVV

SEQ ID NO: 119376 - protein, 27 aa, Artificial Sequence
  Cyclic GFR-binding peptide
SPISMLYINDKQQIIYKQYEDEYDKVV

SEQ ID NO: 119377 - protein, 27 aa, Artificial Sequence
  Cyclic GFR-binding peptide
SPISVLYIDDMGVPTYKQYEDEYDKVV

SEQ ID NO: 119378 - protein, 27 aa, Artificial Sequence
  Cyclic GFR-binding peptide
SPISILFIIGKTPKIYKQYEDEYDKVV

SEQ ID NO: 119379 - protein, 27 aa, Artificial Sequence
  Cyclic GFR-binding peptide
SPISVLYIDSSNNVIYKQYEDEYDKVV

SEQ ID NO: 119380 - protein, 27 aa, Artificial Sequence
  Cyclic GFR-binding peptide
EPLTILYYIGKTPKIEQLSNDEYDKVV

SEQ ID NO: 119381 - protein, 27 aa, Artificial Sequence
  Cyclic GFR-binding peptide
SPISILFIDSANNVVYKQYEDEYDKVV

SEQ ID NO: 119382 - protein, 27 aa, Artificial Sequence
  Cyclic GFR-binding peptide
SPISILFIVGRKPKVYKQYEDEYDKVV

SEQ ID NO: 119383 - protein, 27 aa, Artificial Sequence
  Cyclic GFR-binding peptide
EPLPVVYYDDSSNVIEQLSNDEYDKVV

SEQ ID NO: 119384 - protein, 27 aa, Artificial Sequence
  Cyclic GFR-binding peptide
EPLPMVYYDEYDKVVEQLSNDEYDKVV

SEQ ID NO: 119385 - protein, 27 aa, Artificial Sequence
  Cyclic GFR-binding peptide
SPISMLYIDNGRVLLYKQYEDEYDKVV

SEQ ID NO: 119386 - protein, 27 aa, Artificial Sequence
  Cyclic GFR-binding peptide
EPLTVLYYDDSSNVIEQLSNDEYDKVV

SEQ ID NO: 119387 - protein, 27 aa, Artificial Sequence
  Cyclic GFR-binding peptide
DEYDKVVPYVKLVVKENEDFFLMSLSS

SEQ ID NO: 119388 - protein, 29 aa, Artificial Sequence
  Cyclic GFR-binding peptide
DEYDKVVPYVKLHQGQHPKIRFFLMSLSS

SEQ ID NO: 119389 - protein, 27 aa, Artificial Sequence
  Cyclic GFR-binding peptide
DEYDKVVPYVKLVVNKNEDFFLISLSS

SEQ ID NO: 119390 - protein, 27 aa, Artificial Sequence
  Cyclic GFR-binding peptide
DEYDKVVPYVKLVKPKRGVLFFISLSS

SEQ ID NO: 119391 - protein, 27 aa, Artificial Sequence
  Cyclic GFR-binding peptide
DEYDKVVPYVKLVVNNAADFFLISLSS

SEQ ID NO: 119392 - protein, 27 aa, Artificial Sequence
  Cyclic GFR-binding peptide
DEYDKVVPYVKLIVNNSSDFFLVSLSS

SEQ ID NO: 119393 - protein, 27 aa, Artificial Sequence
  Cyclic GFR-binding peptide
DEYDKVVPYVKLIIQQKDNFFLMSLSS

SEQ ID NO: 119394 - protein, 27 aa, Artificial Sequence
  Cyclic GFR-binding peptide
DEYDKVVPYVKLLLVRGNDFFLMSLSS

SEQ ID NO: 119395 - protein, 27 aa, Artificial Sequence
  Cyclic GFR-binding peptide
DEYDKVVPYVKLVKPTRGVLFFISLSS

SEQ ID NO: 119396 - protein, 27 aa, Artificial Sequence
  Cyclic GFR-binding peptide
DEYDKVVPYVKLVVNNASDFFLISLSS

SEQ ID NO: 119397 - protein, 27 aa, Artificial Sequence
  Cyclic GFR-binding peptide
DEYDKVVPYVKLIKPTKGILFFISLSS

SEQ ID NO: 119398 - protein, 27 aa, Artificial Sequence
  Cyclic GFR-binding peptide
DEYDKVVPYVKLTPVGMDDFFLVSLSS

SEQ ID NO: 119399 - protein, 27 aa, Artificial Sequence
  Cyclic GFR-binding peptide
DEYDKVVPYVKLYTVVGKDFFLISLSS

SEQ ID NO: 119400 - protein, 27 aa, Artificial Sequence
  Cyclic GFR-binding peptide
DEYDKVVPYVKLVVKDYEDFFLMSLSS

SEQ ID NO: 119401 - protein, 27 aa, Artificial Sequence
  Cyclic GFR-binding peptide
DEYDKVVPYVKLIVNSSDDFFLVSLSS

SEQ ID NO: 119402 - protein, 29 aa, Artificial Sequence
  Cyclic GFR-binding peptide
DEYDKVVPYVKLLKPKKRVYEFFLVSLSS

SEQ ID NO: 119403 - protein, 27 aa, Artificial Sequence
  Cyclic GFR-binding peptide
SSLSMLFFDENEKVVLKVYPDEYDKVV

SEQ ID NO: 119404 - protein, 29 aa, Artificial Sequence
  Cyclic GFR-binding peptide
SSLSMLFFRIKPHQGQHLKVYPDEYDKVV

SEQ ID NO: 119405 - protein, 27 aa, Artificial Sequence
  Cyclic GFR-binding peptide
SSLSILFFDENKNVVLKVYPDEYDKVV

SEQ ID NO: 119406 - protein, 27 aa, Artificial Sequence
  Cyclic GFR-binding peptide
SSLSILFFVGRKPKVLKVYPDEYDKVV

SEQ ID NO: 119407 - protein, 27 aa, Artificial Sequence
  Cyclic GFR-binding peptide
SSLSILFFDAANNVVLKVYPDEYDKVV

SEQ ID NO: 119408 - protein, 27 aa, Artificial Sequence
  Cyclic GFR-binding peptide
SSLSVLFFDSSNNVILKVYPDEYDKVV

SEQ ID NO: 119409 - protein, 27 aa, Artificial Sequence
  Cyclic GFR-binding peptide
SSLSMLFFNDKQQIILKVYPDEYDKVV

SEQ ID NO: 119410 - protein, 27 aa, Artificial Sequence
  Cyclic GFR-binding peptide
SSLSMLFFDNGRVLLLKVYPDEYDKVV

SEQ ID NO: 119411 - protein, 27 aa, Artificial Sequence
  Cyclic GFR-binding peptide
SSLSILFFVGRTPKVLKVYPDEYDKVV

SEQ ID NO: 119412 - protein, 27 aa, Artificial Sequence
  Cyclic GFR-binding peptide
SSLSILFFDSANNVVLKVYPDEYDKVV

SEQ ID NO: 119413 - protein, 27 aa, Artificial Sequence
  Cyclic GFR-binding peptide
SSLSILFFIGKTPKILKVYPDEYDKVV

SEQ ID NO: 119414 - protein, 27 aa, Artificial Sequence
  Cyclic GFR-binding peptide
SSLSVLFFDDMGVPTLKVYPDEYDKVV

SEQ ID NO: 119415 - protein, 27 aa, Artificial Sequence
  Cyclic GFR-binding peptide
SSLSILFFDKGVVTYLKVYPDEYDKVV

SEQ ID NO: 119416 - protein, 27 aa, Artificial Sequence
  Cyclic GFR-binding peptide
SSLSMLFFDEYDKVVLKVYPDEYDKVV

SEQ ID NO: 119417 - protein, 27 aa, Artificial Sequence
  Cyclic GFR-binding peptide
SSLSVLFFDDSSNVILKVYPDEYDKVV

SEQ ID NO: 119418 - protein, 29 aa, Artificial Sequence
  Cyclic GFR-binding peptide
SSLSVLFFEYVRKKPKLLKVYPDEYDKVV

SEQ ID NO: 119419 - protein, 27 aa, Artificial Sequence
  Cyclic GFR-binding peptide
DEYDKVVNSLQEVVKDYEDYYLMTLPE

SEQ ID NO: 119420 - protein, 27 aa, Artificial Sequence
  Cyclic GFR-binding peptide
DEYDKVVNSLQEIKPTKGIYYVIPLPE

SEQ ID NO: 119421 - protein, 27 aa, Artificial Sequence
  Cyclic GFR-binding peptide
DEYDKVVSMEGIIVNSSDDMIQVTINS

SEQ ID NO: 119422 - protein, 27 aa, Artificial Sequence
  Cyclic GFR-binding peptide
DEYDKVVNSLQEVKPKRGVYYLITLPE

SEQ ID NO: 119423 - protein, 27 aa, Artificial Sequence
  Cyclic GFR-binding peptide
DEYDKVVNSLQEVKPTRGVYYVIPLPE

SEQ ID NO: 119424 - protein, 27 aa, Artificial Sequence
  Cyclic GFR-binding peptide
DEYDKVVVTAKKVVKENEDIKRMQVPR

SEQ ID NO: 119425 - protein, 27 aa, Artificial Sequence
  Cyclic GFR-binding peptide
DEYDKVVNSLQEIVNSSDDYYVVPLPE

SEQ ID NO: 119426 - protein, 29 aa, Artificial Sequence
  Cyclic GFR-binding peptide
DEYDKVVSMEGIHQGQHPKIRMIQMTINS

SEQ ID NO: 119427 - protein, 29 aa, Artificial Sequence
  Cyclic GFR-binding peptide
DEYDKVVVTAKKLKPKKRVYEIKRVQVPR

SEQ ID NO: 119428 - protein, 27 aa, Artificial Sequence
  Cyclic GFR-binding peptide
DEYDKVVSMEGIVVKDYEDMIQMTINS

SEQ ID NO: 119429 - protein, 29 aa, Artificial Sequence
  Cyclic GFR-binding peptide
DEYDKVVVQVEKHQGQHPKIRVKAMKVSR

SEQ ID NO: 119430 - protein, 27 aa, Artificial Sequence
  Cyclic GFR-binding peptide
DEYDKVVVTAKKIKPTKGIIKRIQVPR

SEQ ID NO: 119431 - protein, 27 aa, Artificial Sequence
  Cyclic GFR-binding peptide
DEYDKVVSMEGIVKPTRGVMIQITINS

SEQ ID NO: 119432 - protein, 29 aa, Artificial Sequence
  Cyclic GFR-binding peptide
DEYDKVVNSLQEFIPKKRVIEYYVVPLPE

SEQ ID NO: 119433 - protein, 27 aa, Artificial Sequence
  Cyclic GFR-binding peptide
DEYDKVVVQVEKVKPKRGVVKAIKVSR

SEQ ID NO: 119434 - protein, 27 aa, Artificial Sequence
  Cyclic GFR-binding peptide
DEYDKVVVQVEKVVKENEDVKAMKVSR

SEQ ID NO: 119435 - protein, 27 aa, Artificial Sequence
  Cyclic GFR-binding peptide
DEYDKVVNSLQEVVKENEDYYVMPLPE

SEQ ID NO: 119436 - protein, 27 aa, Artificial Sequence
  Cyclic GFR-binding peptide
DEYDKVVVTAKKIVNSSDDIKRVQVPR

SEQ ID NO: 119437 - protein, 27 aa, Artificial Sequence
  Cyclic GFR-binding peptide
DEYDKVVVQVEKIKPTKGIVKAIKVSR

SEQ ID NO: 119438 - protein, 27 aa, Artificial Sequence
  Cyclic GFR-binding peptide
DEYDKVVNSLQEIKPTKGIYYLITLPE

SEQ ID NO: 119439 - protein, 29 aa, Artificial Sequence
  Cyclic GFR-binding peptide
DEYDKVVNSLQEFIPKKRVIEYYLVTLPE

SEQ ID NO: 119440 - protein, 27 aa, Artificial Sequence
  Cyclic GFR-binding peptide
DEYDKVVVQVEKIVNSSDDVKAVKVSR

SEQ ID NO: 119441 - protein, 27 aa, Artificial Sequence
  Cyclic GFR-binding peptide
DEYDKVVNSLQEIVNSSDDYYLVTLPE

SEQ ID NO: 119442 - protein, 29 aa, Artificial Sequence
  Cyclic GFR-binding peptide
DEYDKVVVQVEKLKPKKRVYEVKAVKVSR

SEQ ID NO: 119443 - protein, 29 aa, Artificial Sequence
  Cyclic GFR-binding peptide
DEYDKVVVQVEKFIPKKRVIEVKAVKVSR

SEQ ID NO: 119444 - protein, 29 aa, Artificial Sequence
  Cyclic GFR-binding peptide
DEYDKVVVTAKKHQGQHPKIRIKRMQVPR

SEQ ID NO: 119445 - protein, 27 aa, Artificial Sequence
  Cyclic GFR-binding peptide
DEYDKVVNSLQEVVKENEDYYLMTLPE

SEQ ID NO: 119446 - protein, 29 aa, Artificial Sequence
  Cyclic GFR-binding peptide
DEYDKVVSMEGIFIPKKRVIEMIQVTINS

SEQ ID NO: 119447 - protein, 27 aa, Artificial Sequence
  Cyclic GFR-binding peptide
DEYDKVVNSLQEVKPKRGVYYVIPLPE

SEQ ID NO: 119448 - protein, 27 aa, Artificial Sequence
  Cyclic GFR-binding peptide
DEYDKVVVTAKKVKPKRGVIKRIQVPR

SEQ ID NO: 119449 - protein, 27 aa, Artificial Sequence
  Cyclic GFR-binding peptide
DEYDKVVNSLQEVKPTRGVYYLITLPE

SEQ ID NO: 119450 - protein, 27 aa, Artificial Sequence
  Cyclic GFR-binding peptide
DEYDKVVVQVEKVKPTRGVVKAIKVSR

SEQ ID NO: 119451 - protein, 29 aa, Artificial Sequence
  Cyclic GFR-binding peptide
DEYDKVVSMEGILKPKKRVYEMIQVTINS

SEQ ID NO: 119452 - protein, 27 aa, Artificial Sequence
  Cyclic GFR-binding peptide
DEYDKVVNSLQEVVKDYEDYYVMPLPE

SEQ ID NO: 119453 - protein, 27 aa, Artificial Sequence
  Cyclic GFR-binding peptide
DEYDKVVVTAKKVKPTRGVIKRIQVPR

SEQ ID NO: 119454 - protein, 29 aa, Artificial Sequence
  Cyclic GFR-binding peptide
DEYDKVVNSLQELKPKKRVYEYYLVTLPE

SEQ ID NO: 119455 - protein, 27 aa, Artificial Sequence
  Cyclic GFR-binding peptide
DEYDKVVSMEGIVKPKRGVMIQITINS

SEQ ID NO: 119456 - protein, 27 aa, Artificial Sequence
  Cyclic GFR-binding peptide
DEYDKVVSMEGIVVKENEDMIQMTINS

SEQ ID NO: 119457 - protein, 27 aa, Artificial Sequence
  Cyclic GFR-binding peptide
DEYDKVVSMEGIIKPTKGIMIQITINS

SEQ ID NO: 119458 - protein, 29 aa, Artificial Sequence
  Cyclic GFR-binding peptide
DEYDKVVNSLQEHQGQHPKIRYYLMTLPE

SEQ ID NO: 119459 - protein, 27 aa, Artificial Sequence
  Cyclic GFR-binding peptide
DEYDKVVVTAKKVVKDYEDIKRMQVPR

SEQ ID NO: 119460 - protein, 29 aa, Artificial Sequence
  Cyclic GFR-binding peptide
DEYDKVVNSLQEHQGQHPKIRYYVMPLPE

SEQ ID NO: 119461 - protein, 29 aa, Artificial Sequence
  Cyclic GFR-binding peptide
DEYDKVVNSLQELKPKKRVYEYYVVPLPE

SEQ ID NO: 119462 - protein, 29 aa, Artificial Sequence
  Cyclic GFR-binding peptide
DEYDKVVVTAKKFIPKKRVIEIKRVQVPR

SEQ ID NO: 119463 - protein, 27 aa, Artificial Sequence
  Cyclic GFR-binding peptide
DEYDKVVVQVEKVVKDYEDVKAMKVSR

SEQ ID NO: 119464 - protein, 27 aa, Artificial Sequence
  Cyclic GFR-binding peptide
EPLTMLYYDEYDKVVEQLSNDEYDKVV

SEQ ID NO: 119465 - protein, 27 aa, Artificial Sequence
  Cyclic GFR-binding peptide
EPLPIVYYIGKTPKIEQLSNDEYDKVV

SEQ ID NO: 119466 - protein, 27 aa, Artificial Sequence
  Cyclic GFR-binding peptide
SNITVQIMDDSSNVIIGEMSDEYDKVV

SEQ ID NO: 119467 - protein, 27 aa, Artificial Sequence
  Cyclic GFR-binding peptide
EPLTILYYVGRKPKVEQLSNDEYDKVV

SEQ ID NO: 119468 - protein, 27 aa, Artificial Sequence
  Cyclic GFR-binding peptide
EPLPIVYYVGRTPKVEQLSNDEYDKVV

SEQ ID NO: 119469 - protein, 27 aa, Artificial Sequence
  Cyclic GFR-binding peptide
RPVQMRKIDENEKVVKKATVDEYDKVV

SEQ ID NO: 119470 - protein, 27 aa, Artificial Sequence
  Cyclic GFR-binding peptide
EPLPVVYYDDSSNVIEQLSNDEYDKVV

SEQ ID NO: 119471 - protein, 29 aa, Artificial Sequence
  Cyclic GFR-binding peptide
SNITMQIMRIKPHQGQHIGEMSDEYDKVV

SEQ ID NO: 119472 - protein, 29 aa, Artificial Sequence
  Cyclic GFR-binding peptide
RPVQVRKIEYVRKKPKLKKATVDEYDKVV

SEQ ID NO: 119473 - protein, 27 aa, Artificial Sequence
  Cyclic GFR-binding peptide
SNITMQIMDEYDKVVIGEMSDEYDKVV

SEQ ID NO: 119474 - protein, 29 aa, Artificial Sequence
  Cyclic GFR-binding peptide
RSVKMAKVRIKPHQGQHKEVQVDEYDKVV

SEQ ID NO: 119475 - protein, 27 aa, Artificial Sequence
  Cyclic GFR-binding peptide
RPVQIRKIIGKTPKIKKATVDEYDKVV

SEQ ID NO: 119476 - protein, 27 aa, Artificial Sequence
  Cyclic GFR-binding peptide
SNITIQIMVGRTPKVIGEMSDEYDKVV

SEQ ID NO: 119477 - protein, 29 aa, Artificial Sequence
  Cyclic GFR-binding peptide
EPLPVVYYEIVRKKPIFEQLSNDEYDKVV

SEQ ID NO: 119478 - protein, 27 aa, Artificial Sequence
  Cyclic GFR-binding peptide
RSVKIAKVVGRKPKVKEVQVDEYDKVV

SEQ ID NO: 119479 - protein, 27 aa, Artificial Sequence
  Cyclic GFR-binding peptide
RSVKMAKVDENEKVVKEVQVDEYDKVV

SEQ ID NO: 119480 - protein, 27 aa, Artificial Sequence
  Cyclic GFR-binding peptide
EPLPMVYYDENEKVVEQLSNDEYDKVV

SEQ ID NO: 119481 - protein, 27 aa, Artificial Sequence
  Cyclic GFR-binding peptide
RPVQVRKIDDSSNVIKKATVDEYDKVV

SEQ ID NO: 119482 - protein, 27 aa, Artificial Sequence
  Cyclic GFR-binding peptide
RSVKIAKVIGKTPKIKEVQVDEYDKVV

SEQ ID NO: 119483 - protein, 27 aa, Artificial Sequence
  Cyclic GFR-binding peptide
EPLTILYYIGKTPKIEQLSNDEYDKVV

SEQ ID NO: 119484 - protein, 29 aa, Artificial Sequence
  Cyclic GFR-binding peptide
EPLTVLYYEIVRKKPIFEQLSNDEYDKVV

SEQ ID NO: 119485 - protein, 27 aa, Artificial Sequence
  Cyclic GFR-binding peptide
RSVKVAKVDDSSNVIKEVQVDEYDKVV

SEQ ID NO: 119486 - protein, 27 aa, Artificial Sequence
  Cyclic GFR-binding peptide
EPLTVLYYDDSSNVIEQLSNDEYDKVV

SEQ ID NO: 119487 - protein, 29 aa, Artificial Sequence
  Cyclic GFR-binding peptide
RSVKVAKVEYVRKKPKLKEVQVDEYDKVV

SEQ ID NO: 119488 - protein, 29 aa, Artificial Sequence
  Cyclic GFR-binding peptide
RSVKVAKVEIVRKKPIFKEVQVDEYDKVV

SEQ ID NO: 119489 - protein, 29 aa, Artificial Sequence
  Cyclic GFR-binding peptide
RPVQMRKIRIKPHQGQHKKATVDEYDKVV

SEQ ID NO: 119490 - protein, 27 aa, Artificial Sequence
  Cyclic GFR-binding peptide
EPLTMLYYDENEKVVEQLSNDEYDKVV

SEQ ID NO: 119491 - protein, 29 aa, Artificial Sequence
  Cyclic GFR-binding peptide
SNITVQIMEIVRKKPIFIGEMSDEYDKVV

SEQ ID NO: 119492 - protein, 27 aa, Artificial Sequence
  Cyclic GFR-binding peptide
EPLPIVYYVGRKPKVEQLSNDEYDKVV

SEQ ID NO: 119493 - protein, 27 aa, Artificial Sequence
  Cyclic GFR-binding peptide
RPVQIRKIVGRKPKVKKATVDEYDKVV

SEQ ID NO: 119494 - protein, 27 aa, Artificial Sequence
  Cyclic GFR-binding peptide
EPLTILYYVGRTPKVEQLSNDEYDKVV

SEQ ID NO: 119495 - protein, 27 aa, Artificial Sequence
  Cyclic GFR-binding peptide
RSVKIAKVVGRTPKVKEVQVDEYDKVV

SEQ ID NO: 119496 - protein, 29 aa, Artificial Sequence
  Cyclic GFR-binding peptide
SNITVQIMEYVRKKPKLIGEMSDEYDKVV

SEQ ID NO: 119497 - protein, 27 aa, Artificial Sequence
  Cyclic GFR-binding peptide
EPLPMVYYDEYDKVVEQLSNDEYDKVV

SEQ ID NO: 119498 - protein, 27 aa, Artificial Sequence
  Cyclic GFR-binding peptide
RPVQIRKIVGRTPKVKKATVDEYDKVV

SEQ ID NO: 119499 - protein, 29 aa, Artificial Sequence
  Cyclic GFR-binding peptide
EPLTVLYYEYVRKKPKLEQLSNDEYDKVV

SEQ ID NO: 119500 - protein, 27 aa, Artificial Sequence
  Cyclic GFR-binding peptide
SNITIQIMVGRKPKVIGEMSDEYDKVV

SEQ ID NO: 119501 - protein, 27 aa, Artificial Sequence
  Cyclic GFR-binding peptide
SNITMQIMDENEKVVIGEMSDEYDKVV

SEQ ID NO: 119502 - protein, 27 aa, Artificial Sequence
  Cyclic GFR-binding peptide
SNITIQIMIGKTPKIIGEMSDEYDKVV

SEQ ID NO: 119503 - protein, 29 aa, Artificial Sequence
  Cyclic GFR-binding peptide
EPLTMLYYRIKPHQGQHEQLSNDEYDKVV

SEQ ID NO: 119504 - protein, 27 aa, Artificial Sequence
  Cyclic GFR-binding peptide
RPVQMRKIDEYDKVVKKATVDEYDKVV

SEQ ID NO: 119505 - protein, 29 aa, Artificial Sequence
  Cyclic GFR-binding peptide
EPLPMVYYRIKPHQGQHEQLSNDEYDKVV

SEQ ID NO: 119506 - protein, 29 aa, Artificial Sequence
  Cyclic GFR-binding peptide
EPLPVVYYEYVRKKPKLEQLSNDEYDKVV

SEQ ID NO: 119507 - protein, 29 aa, Artificial Sequence
  Cyclic GFR-binding peptide
RPVQVRKIEIVRKKPIFKKATVDEYDKVV

SEQ ID NO: 119508 - protein, 27 aa, Artificial Sequence
  Cyclic GFR-binding peptide
RSVKMAKVDEYDKVVKEVQVDEYDKVV

SEQ ID NO: 119509 - protein, 27 aa, Artificial Sequence
  Cyclic GFR-binding peptide
DEYDKVVRYKKLIIQQKDNFYLMSIAN

SEQ ID NO: 119510 - protein, 27 aa, Artificial Sequence
  Cyclic GFR-binding peptide
DEYDKVVRYKKLIVNNSSDFYLVSIAN

SEQ ID NO: 119511 - protein, 27 aa, Artificial Sequence
  Cyclic GFR-binding peptide
DEYDKVVRYKKLYTVVGKDFYLISIAN

SEQ ID NO: 119512 - protein, 27 aa, Artificial Sequence
  Cyclic GFR-binding peptide
DEYDKVVRYKKLIVNSSDDFYLVSIAN

SEQ ID NO: 119513 - protein, 27 aa, Artificial Sequence
  Cyclic GFR-binding peptide
DEYDKVVRYKKLVVKDYEDFYLMSIAN

SEQ ID NO: 119514 - protein, 27 aa, Artificial Sequence
  Cyclic GFR-binding peptide
DEYDKVVRYKKLLLVRGNDFYLMSIAN

SEQ ID NO: 119515 - protein, 27 aa, Artificial Sequence
  Cyclic GFR-binding peptide
DEYDKVVRYKKLVVKENEDFYLMSIAN

SEQ ID NO: 119516 - protein, 27 aa, Artificial Sequence
  Cyclic GFR-binding peptide
DEYDKVVRYKKLVVNNAADFYLISIAN

SEQ ID NO: 119517 - protein, 27 aa, Artificial Sequence
  Cyclic GFR-binding peptide
DEYDKVVRYKKLTPVGMDDFYLVSIAN

SEQ ID NO: 119518 - protein, 27 aa, Artificial Sequence
  Cyclic GFR-binding peptide
DEYDKVVRYKKLVVNNASDFYLISIAN

SEQ ID NO: 119519 - protein, 27 aa, Artificial Sequence
  Cyclic GFR-binding peptide
NAISMLYFNDKQQIILKKYRDEYDKVV

SEQ ID NO: 119520 - protein, 27 aa, Artificial Sequence
  Cyclic GFR-binding peptide
NAISVLYFDSSNNVILKKYRDEYDKVV

SEQ ID NO: 119521 - protein, 27 aa, Artificial Sequence
  Cyclic GFR-binding peptide
NAISILYFDKGVVTYLKKYRDEYDKVV

SEQ ID NO: 119522 - protein, 27 aa, Artificial Sequence
  Cyclic GFR-binding peptide
NAISVLYFDDSSNVILKKYRDEYDKVV

SEQ ID NO: 119523 - protein, 27 aa, Artificial Sequence
  Cyclic GFR-binding peptide
NAISMLYFDEYDKVVLKKYRDEYDKVV

SEQ ID NO: 119524 - protein, 27 aa, Artificial Sequence
  Cyclic GFR-binding peptide
NAISMLYFDNGRVLLLKKYRDEYDKVV

SEQ ID NO: 119525 - protein, 27 aa, Artificial Sequence
  Cyclic GFR-binding peptide
NAISMLYFDENEKVVLKKYRDEYDKVV

SEQ ID NO: 119526 - protein, 27 aa, Artificial Sequence
  Cyclic GFR-binding peptide
NAISILYFDAANNVVLKKYRDEYDKVV

SEQ ID NO: 119527 - protein, 27 aa, Artificial Sequence
  Cyclic GFR-binding peptide
NAISVLYFDDMGVPTLKKYRDEYDKVV

SEQ ID NO: 119528 - protein, 27 aa, Artificial Sequence
  Cyclic GFR-binding peptide
NAISILYFDSANNVVLKKYRDEYDKVV

SEQ ID NO: 119529 - protein, 27 aa, Artificial Sequence
  Cyclic GFR-binding peptide
DEYDKVVEYKFKVKPTRGVLYLISIPE

SEQ ID NO: 119530 - protein, 27 aa, Artificial Sequence
  Cyclic GFR-binding peptide
DEYDKVVYHYKLVVKDYEDKYLMSIPS

SEQ ID NO: 119531 - protein, 27 aa, Artificial Sequence
  Cyclic GFR-binding peptide
DEYDKVVEYKFKTPVGMDDLYLVSIPE

SEQ ID NO: 119532 - protein, 27 aa, Artificial Sequence
  Cyclic GFR-binding peptide
DEYDKVVRYKKLVVKDYEDFYLMSIAN

SEQ ID NO: 119533 - protein, 27 aa, Artificial Sequence
  Cyclic GFR-binding peptide
DEYDKVVRHKRLVKPKRGVYYLISTAS

SEQ ID NO: 119534 - protein, 27 aa, Artificial Sequence
  Cyclic GFR-binding peptide
DEYDKVVYHYKLVKPKRGVKYLISIPS

SEQ ID NO: 119535 - protein, 27 aa, Artificial Sequence
  Cyclic GFR-binding peptide
DEYDKVVEYKFKIKPTKGILYLISIPE

SEQ ID NO: 119536 - protein, 27 aa, Artificial Sequence
  Cyclic GFR-binding peptide
DEYDKVVEYKFKVVNKNEDLYLISIPE

SEQ ID NO: 119537 - protein, 27 aa, Artificial Sequence
  Cyclic GFR-binding peptide
DEYDKVVPIKGYVKPTRGVFYLINIPS

SEQ ID NO: 119538 - protein, 27 aa, Artificial Sequence
  Cyclic GFR-binding peptide
DEYDKVVPIKGYVVKENEDFYLMNIPS

SEQ ID NO: 119539 - protein, 27 aa, Artificial Sequence
  Cyclic GFR-binding peptide
DEYDKVVYHYKLYTVVGKDKYLISIPS

SEQ ID NO: 119540 - protein, 27 aa, Artificial Sequence
  Cyclic GFR-binding peptide
DEYDKVVEYKFKLLVRGNDLYLMSIPE

SEQ ID NO: 119541 - protein, 27 aa, Artificial Sequence
  Cyclic GFR-binding peptide
DEYDKVVRYKKLVKPKRGVFYLISIAN

SEQ ID NO: 119542 - protein, 27 aa, Artificial Sequence
  Cyclic GFR-binding peptide
DEYDKVVPIKGYTPVGMDDFYLVNIPS

SEQ ID NO: 119543 - protein, 27 aa, Artificial Sequence
  Cyclic GFR-binding peptide
DEYDKVVYHYKLVVNKNEDKYLISIPS

SEQ ID NO: 119544 - protein, 27 aa, Artificial Sequence
  Cyclic GFR-binding peptide
DEYDKVVYHYKLIVNSSDDKYLVSIPS

SEQ ID NO: 119545 - protein, 27 aa, Artificial Sequence
  Cyclic GFR-binding peptide
DEYDKVVPIKGYIVNSSDDFYLVNIPS

SEQ ID NO: 119546 - protein, 27 aa, Artificial Sequence
  Cyclic GFR-binding peptide
DEYDKVVRYKKLYTVVGKDFYLISIAN

SEQ ID NO: 119547 - protein, 27 aa, Artificial Sequence
  Cyclic GFR-binding peptide
DEYDKVVRHKRLLLVRGNDYYLMSTAS

SEQ ID NO: 119548 - protein, 27 aa, Artificial Sequence
  Cyclic GFR-binding peptide
DEYDKVVYHYKLLLVRGNDKYLMSIPS

SEQ ID NO: 119549 - protein, 27 aa, Artificial Sequence
  Cyclic GFR-binding peptide
DEYDKVVRYKKLIVNSSDDFYLVSIAN

SEQ ID NO: 119550 - protein, 27 aa, Artificial Sequence
  Cyclic GFR-binding peptide
DEYDKVVRHKRLVVNKNEDYYLISTAS

SEQ ID NO: 119551 - protein, 27 aa, Artificial Sequence
  Cyclic GFR-binding peptide
DEYDKVVRHKRLIKPTKGIYYLISTAS

SEQ ID NO: 119552 - protein, 27 aa, Artificial Sequence
  Cyclic GFR-binding peptide
DEYDKVVPIKGYYTVVGKDFYLINIPS

SEQ ID NO: 119553 - protein, 27 aa, Artificial Sequence
  Cyclic GFR-binding peptide
DEYDKVVYHYKLTPVGMDDKYLVSIPS

SEQ ID NO: 119554 - protein, 27 aa, Artificial Sequence
  Cyclic GFR-binding peptide
DEYDKVVRHKRLIVNNSSDYYLVSTAS

SEQ ID NO: 119555 - protein, 27 aa, Artificial Sequence
  Cyclic GFR-binding peptide
DEYDKVVRYKKLLLVRGNDFYLMSIAN

SEQ ID NO: 119556 - protein, 27 aa, Artificial Sequence
  Cyclic GFR-binding peptide
DEYDKVVYHYKLVKPTRGVKYLISIPS

SEQ ID NO: 119557 - protein, 27 aa, Artificial Sequence
  Cyclic GFR-binding peptide
DEYDKVVRHKRLIVNSSDDYYLVSTAS

SEQ ID NO: 119558 - protein, 27 aa, Artificial Sequence
  Cyclic GFR-binding peptide
DEYDKVVPIKGYLLVRGNDFYLMNIPS

SEQ ID NO: 119559 - protein, 27 aa, Artificial Sequence
  Cyclic GFR-binding peptide
DEYDKVVRYKKLVVNKNEDFYLISIAN

SEQ ID NO: 119560 - protein, 27 aa, Artificial Sequence
  Cyclic GFR-binding peptide
DEYDKVVEYKFKVVKDYEDLYLMSIPE

SEQ ID NO: 119561 - protein, 27 aa, Artificial Sequence
  Cyclic GFR-binding peptide
DEYDKVVPIKGYVVNKNEDFYLINIPS

SEQ ID NO: 119562 - protein, 27 aa, Artificial Sequence
  Cyclic GFR-binding peptide
DEYDKVVPIKGYIKPTKGIFYLINIPS

SEQ ID NO: 119563 - protein, 27 aa, Artificial Sequence
  Cyclic GFR-binding peptide
DEYDKVVEYKFKVVNNAADLYLISIPE

SEQ ID NO: 119564 - protein, 27 aa, Artificial Sequence
  Cyclic GFR-binding peptide
DEYDKVVRHKRLYTVVGKDYYLISTAS

SEQ ID NO: 119565 - protein, 27 aa, Artificial Sequence
  Cyclic GFR-binding peptide
DEYDKVVRYKKLIKPTKGIFYLISIAN

SEQ ID NO: 119566 - protein, 27 aa, Artificial Sequence
  Cyclic GFR-binding peptide
DEYDKVVPIKGYVVKDYEDFYLMNIPS

SEQ ID NO: 119567 - protein, 27 aa, Artificial Sequence
  Cyclic GFR-binding peptide
DEYDKVVEYKFKVVNNASDLYLISIPE

SEQ ID NO: 119568 - protein, 27 aa, Artificial Sequence
  Cyclic GFR-binding peptide
DEYDKVVRYKKLVKPTRGVFYLISIAN

SEQ ID NO: 119569 - protein, 27 aa, Artificial Sequence
  Cyclic GFR-binding peptide
DEYDKVVRHKRLVVKENEDYYLMSTAS

SEQ ID NO: 119570 - protein, 27 aa, Artificial Sequence
  Cyclic GFR-binding peptide
DEYDKVVYHYKLIKPTKGIKYLISIPS

SEQ ID NO: 119571 - protein, 27 aa, Artificial Sequence
  Cyclic GFR-binding peptide
DEYDKVVYHYKLVVKENEDKYLMSIPS

SEQ ID NO: 119572 - protein, 27 aa, Artificial Sequence
  Cyclic GFR-binding peptide
DEYDKVVRHKRLIIQQKDNYYLMSTAS

SEQ ID NO: 119573 - protein, 27 aa, Artificial Sequence
  Cyclic GFR-binding peptide
DEYDKVVRYKKLVVKENEDFYLMSIAN

SEQ ID NO: 119574 - protein, 27 aa, Artificial Sequence
  Cyclic GFR-binding peptide
DEYDKVVRYKKLVVNNAADFYLISIAN

SEQ ID NO: 119575 - protein, 27 aa, Artificial Sequence
  Cyclic GFR-binding peptide
DEYDKVVEYKFKIIQQKDNLYLMSIPE

SEQ ID NO: 119576 - protein, 27 aa, Artificial Sequence
  Cyclic GFR-binding peptide
DEYDKVVRYKKLTPVGMDDFYLVSIAN

SEQ ID NO: 119577 - protein, 27 aa, Artificial Sequence
  Cyclic GFR-binding peptide
DEYDKVVYHYKLVVNNAADKYLISIPS

SEQ ID NO: 119578 - protein, 27 aa, Artificial Sequence
  Cyclic GFR-binding peptide
DEYDKVVPIKGYIVNNSSDFYLVNIPS

SEQ ID NO: 119579 - protein, 27 aa, Artificial Sequence
  Cyclic GFR-binding peptide
DEYDKVVPIKGYVKPKRGVFYLINIPS

SEQ ID NO: 119580 - protein, 27 aa, Artificial Sequence
  Cyclic GFR-binding peptide
DEYDKVVRYKKLIIQQKDNFYLMSIAN

SEQ ID NO: 119581 - protein, 27 aa, Artificial Sequence
  Cyclic GFR-binding peptide
DEYDKVVPIKGYIIQQKDNFYLMNIPS

SEQ ID NO: 119582 - protein, 27 aa, Artificial Sequence
  Cyclic GFR-binding peptide
DEYDKVVRYKKLIVNNSSDFYLVSIAN

SEQ ID NO: 119583 - protein, 27 aa, Artificial Sequence
  Cyclic GFR-binding peptide
DEYDKVVPIKGYVVNNAADFYLINIPS

SEQ ID NO: 119584 - protein, 27 aa, Artificial Sequence
  Cyclic GFR-binding peptide
DEYDKVVRHKRLVKPTRGVYYLISTAS

SEQ ID NO: 119585 - protein, 27 aa, Artificial Sequence
  Cyclic GFR-binding peptide
DEYDKVVEYKFKIVNNSSDLYLVSIPE

SEQ ID NO: 119586 - protein, 27 aa, Artificial Sequence
  Cyclic GFR-binding peptide
DEYDKVVRHKRLVVNNASDYYLISTAS

SEQ ID NO: 119587 - protein, 27 aa, Artificial Sequence
  Cyclic GFR-binding peptide
DEYDKVVRHKRLTPVGMDDYYLVSTAS

SEQ ID NO: 119588 - protein, 27 aa, Artificial Sequence
  Cyclic GFR-binding peptide
DEYDKVVYHYKLIVNNSSDKYLVSIPS

SEQ ID NO: 119589 - protein, 27 aa, Artificial Sequence
  Cyclic GFR-binding peptide
DEYDKVVYHYKLVVNNASDKYLISIPS

SEQ ID NO: 119590 - protein, 27 aa, Artificial Sequence
  Cyclic GFR-binding peptide
DEYDKVVEYKFKIVNSSDDLYLVSIPE

SEQ ID NO: 119591 - protein, 27 aa, Artificial Sequence
  Cyclic GFR-binding peptide
DEYDKVVEYKFKVKPKRGVLYLISIPE

SEQ ID NO: 119592 - protein, 27 aa, Artificial Sequence
  Cyclic GFR-binding peptide
DEYDKVVRHKRLVVKDYEDYYLMSTAS

SEQ ID NO: 119593 - protein, 27 aa, Artificial Sequence
  Cyclic GFR-binding peptide
DEYDKVVEYKFKVVKENEDLYLMSIPE

SEQ ID NO: 119594 - protein, 27 aa, Artificial Sequence
  Cyclic GFR-binding peptide
DEYDKVVEYKFKYTVVGKDLYLISIPE

SEQ ID NO: 119595 - protein, 27 aa, Artificial Sequence
  Cyclic GFR-binding peptide
DEYDKVVPIKGYVVNNASDFYLINIPS

SEQ ID NO: 119596 - protein, 27 aa, Artificial Sequence
  Cyclic GFR-binding peptide
DEYDKVVYHYKLIIQQKDNKYLMSIPS

SEQ ID NO: 119597 - protein, 27 aa, Artificial Sequence
  Cyclic GFR-binding peptide
DEYDKVVRYKKLVVNNASDFYLISIAN

SEQ ID NO: 119598 - protein, 27 aa, Artificial Sequence
  Cyclic GFR-binding peptide
DEYDKVVRHKRLVVNNAADYYLISTAS

SEQ ID NO: 119599 - protein, 27 aa, Artificial Sequence
  Cyclic GFR-binding peptide
EPISILYLVGRTPKVKFKYEDEYDKVV

SEQ ID NO: 119600 - protein, 27 aa, Artificial Sequence
  Cyclic GFR-binding peptide
SPISMLYKDEYDKVVLKYHYDEYDKVV

SEQ ID NO: 119601 - protein, 27 aa, Artificial Sequence
  Cyclic GFR-binding peptide
EPISVLYLDDMGVPTKFKYEDEYDKVV

SEQ ID NO: 119602 - protein, 27 aa, Artificial Sequence
  Cyclic GFR-binding peptide
NAISMLYFDEYDKVVLKKYRDEYDKVV

SEQ ID NO: 119603 - protein, 27 aa, Artificial Sequence
  Cyclic GFR-binding peptide
SATSILYYVGRKPKVLRKHRDEYDKVV

SEQ ID NO: 119604 - protein, 27 aa, Artificial Sequence
  Cyclic GFR-binding peptide
SPISILYKVGRKPKVLKYHYDEYDKVV

SEQ ID NO: 119605 - protein, 27 aa, Artificial Sequence
  Cyclic GFR-binding peptide
EPISILYLIGKTPKIKFKYEDEYDKVV

SEQ ID NO: 119606 - protein, 27 aa, Artificial Sequence
  Cyclic GFR-binding peptide
EPISILYLDENKNVVKFKYEDEYDKVV

SEQ ID NO: 119607 - protein, 27 aa, Artificial Sequence
  Cyclic GFR-binding peptide
SPINILYFVGRTPKVYGKIPDEYDKVV

SEQ ID NO: 119608 - protein, 27 aa, Artificial Sequence
  Cyclic GFR-binding peptide
SPINMLYFDENEKVVYGKIPDEYDKVV

SEQ ID NO: 119609 - protein, 27 aa, Artificial Sequence
  Cyclic GFR-binding peptide
SPISILYKDKGVVTYLKYHYDEYDKVV

SEQ ID NO: 119610 - protein, 27 aa, Artificial Sequence
  Cyclic GFR-binding peptide
EPISMLYLDNGRVLLKFKYEDEYDKVV

SEQ ID NO: 119611 - protein, 27 aa, Artificial Sequence
  Cyclic GFR-binding peptide
NAISILYFVGRKPKVLKKYRDEYDKVV

SEQ ID NO: 119612 - protein, 27 aa, Artificial Sequence
  Cyclic GFR-binding peptide
SPINVLYFDDMGVPTYGKIPDEYDKVV

SEQ ID NO: 119613 - protein, 27 aa, Artificial Sequence
  Cyclic GFR-binding peptide
SPISILYKDENKNVVLKYHYDEYDKVV

SEQ ID NO: 119614 - protein, 27 aa, Artificial Sequence
  Cyclic GFR-binding peptide
SPISVLYKDDSSNVILKYHYDEYDKVV

SEQ ID NO: 119615 - protein, 27 aa, Artificial Sequence
  Cyclic GFR-binding peptide
SPINVLYFDDSSNVIYGKIPDEYDKVV

SEQ ID NO: 119616 - protein, 27 aa, Artificial Sequence
  Cyclic GFR-binding peptide
NAISILYFDKGVVTYLKKYRDEYDKVV

SEQ ID NO: 119617 - protein, 27 aa, Artificial Sequence
  Cyclic GFR-binding peptide
SATSMLYYDNGRVLLLRKHRDEYDKVV

SEQ ID NO: 119618 - protein, 27 aa, Artificial Sequence
  Cyclic GFR-binding peptide
SPISMLYKDNGRVLLLKYHYDEYDKVV

SEQ ID NO: 119619 - protein, 27 aa, Artificial Sequence
  Cyclic GFR-binding peptide
NAISVLYFDDSSNVILKKYRDEYDKVV

SEQ ID NO: 119620 - protein, 27 aa, Artificial Sequence
  Cyclic GFR-binding peptide
SATSILYYDENKNVVLRKHRDEYDKVV

SEQ ID NO: 119621 - protein, 27 aa, Artificial Sequence
  Cyclic GFR-binding peptide
SATSILYYIGKTPKILRKHRDEYDKVV

SEQ ID NO: 119622 - protein, 27 aa, Artificial Sequence
  Cyclic GFR-binding peptide
SPINILYFDKGVVTYYGKIPDEYDKVV

SEQ ID NO: 119623 - protein, 27 aa, Artificial Sequence
  Cyclic GFR-binding peptide
SPISVLYKDDMGVPTLKYHYDEYDKVV

SEQ ID NO: 119624 - protein, 27 aa, Artificial Sequence
  Cyclic GFR-binding peptide
SATSVLYYDSSNNVILRKHRDEYDKVV

SEQ ID NO: 119625 - protein, 27 aa, Artificial Sequence
  Cyclic GFR-binding peptide
NAISMLYFDNGRVLLLKKYRDEYDKVV

SEQ ID NO: 119626 - protein, 27 aa, Artificial Sequence
  Cyclic GFR-binding peptide
SPISILYKVGRTPKVLKYHYDEYDKVV

SEQ ID NO: 119627 - protein, 27 aa, Artificial Sequence
  Cyclic GFR-binding peptide
SATSVLYYDDSSNVILRKHRDEYDKVV

SEQ ID NO: 119628 - protein, 27 aa, Artificial Sequence
  Cyclic GFR-binding peptide
SPINMLYFDNGRVLLYGKIPDEYDKVV

SEQ ID NO: 119629 - protein, 27 aa, Artificial Sequence
  Cyclic GFR-binding peptide
NAISILYFDENKNVVLKKYRDEYDKVV

SEQ ID NO: 119630 - protein, 27 aa, Artificial Sequence
  Cyclic GFR-binding peptide
EPISMLYLDEYDKVVKFKYEDEYDKVV

SEQ ID NO: 119631 - protein, 27 aa, Artificial Sequence
  Cyclic GFR-binding peptide
SPINILYFDENKNVVYGKIPDEYDKVV

SEQ ID NO: 119632 - protein, 27 aa, Artificial Sequence
  Cyclic GFR-binding peptide
SPINILYFIGKTPKIYGKIPDEYDKVV

SEQ ID NO: 119633 - protein, 27 aa, Artificial Sequence
  Cyclic GFR-binding peptide
EPISILYLDAANNVVKFKYEDEYDKVV

SEQ ID NO: 119634 - protein, 27 aa, Artificial Sequence
  Cyclic GFR-binding peptide
SATSILYYDKGVVTYLRKHRDEYDKVV

SEQ ID NO: 119635 - protein, 27 aa, Artificial Sequence
  Cyclic GFR-binding peptide
NAISILYFIGKTPKILKKYRDEYDKVV

SEQ ID NO: 119636 - protein, 27 aa, Artificial Sequence
  Cyclic GFR-binding peptide
SPINMLYFDEYDKVVYGKIPDEYDKVV

SEQ ID NO: 119637 - protein, 27 aa, Artificial Sequence
  Cyclic GFR-binding peptide
EPISILYLDSANNVVKFKYEDEYDKVV

SEQ ID NO: 119638 - protein, 27 aa, Artificial Sequence
  Cyclic GFR-binding peptide
NAISILYFVGRTPKVLKKYRDEYDKVV

SEQ ID NO: 119639 - protein, 27 aa, Artificial Sequence
  Cyclic GFR-binding peptide
SATSMLYYDENEKVVLRKHRDEYDKVV

SEQ ID NO: 119640 - protein, 27 aa, Artificial Sequence
  Cyclic GFR-binding peptide
SPISILYKIGKTPKILKYHYDEYDKVV

SEQ ID NO: 119641 - protein, 27 aa, Artificial Sequence
  Cyclic GFR-binding peptide
SPISMLYKDENEKVVLKYHYDEYDKVV

SEQ ID NO: 119642 - protein, 27 aa, Artificial Sequence
  Cyclic GFR-binding peptide
SATSMLYYNDKQQIILRKHRDEYDKVV

SEQ ID NO: 119643 - protein, 27 aa, Artificial Sequence
  Cyclic GFR-binding peptide
NAISMLYFDENEKVVLKKYRDEYDKVV

SEQ ID NO: 119644 - protein, 27 aa, Artificial Sequence
  Cyclic GFR-binding peptide
NAISILYFDAANNVVLKKYRDEYDKVV

SEQ ID NO: 119645 - protein, 27 aa, Artificial Sequence
  Cyclic GFR-binding peptide
EPISMLYLNDKQQIIKFKYEDEYDKVV

SEQ ID NO: 119646 - protein, 27 aa, Artificial Sequence
  Cyclic GFR-binding peptide
NAISVLYFDDMGVPTLKKYRDEYDKVV

SEQ ID NO: 119647 - protein, 27 aa, Artificial Sequence
  Cyclic GFR-binding peptide
SPISILYKDAANNVVLKYHYDEYDKVV

SEQ ID NO: 119648 - protein, 27 aa, Artificial Sequence
  Cyclic GFR-binding peptide
SPINVLYFDSSNNVIYGKIPDEYDKVV

SEQ ID NO: 119649 - protein, 27 aa, Artificial Sequence
  Cyclic GFR-binding peptide
SPINILYFVGRKPKVYGKIPDEYDKVV

SEQ ID NO: 119650 - protein, 27 aa, Artificial Sequence
  Cyclic GFR-binding peptide
NAISMLYFNDKQQIILKKYRDEYDKVV

SEQ ID NO: 119651 - protein, 27 aa, Artificial Sequence
  Cyclic GFR-binding peptide
SPINMLYFNDKQQIIYGKIPDEYDKVV

SEQ ID NO: 119652 - protein, 27 aa, Artificial Sequence
  Cyclic GFR-binding peptide
NAISVLYFDSSNNVILKKYRDEYDKVV

SEQ ID NO: 119653 - protein, 27 aa, Artificial Sequence
  Cyclic GFR-binding peptide
SPINILYFDAANNVVYGKIPDEYDKVV

SEQ ID NO: 119654 - protein, 27 aa, Artificial Sequence
  Cyclic GFR-binding peptide
SATSILYYVGRTPKVLRKHRDEYDKVV

SEQ ID NO: 119655 - protein, 27 aa, Artificial Sequence
  Cyclic GFR-binding peptide
EPISVLYLDSSNNVIKFKYEDEYDKVV

SEQ ID NO: 119656 - protein, 27 aa, Artificial Sequence
  Cyclic GFR-binding peptide
SATSILYYDSANNVVLRKHRDEYDKVV

SEQ ID NO: 119657 - protein, 27 aa, Artificial Sequence
  Cyclic GFR-binding peptide
SATSVLYYDDMGVPTLRKHRDEYDKVV

SEQ ID NO: 119658 - protein, 27 aa, Artificial Sequence
  Cyclic GFR-binding peptide
SPISVLYKDSSNNVILKYHYDEYDKVV

SEQ ID NO: 119659 - protein, 27 aa, Artificial Sequence
  Cyclic GFR-binding peptide
SPISILYKDSANNVVLKYHYDEYDKVV

SEQ ID NO: 119660 - protein, 27 aa, Artificial Sequence
  Cyclic GFR-binding peptide
EPISVLYLDDSSNVIKFKYEDEYDKVV

SEQ ID NO: 119661 - protein, 27 aa, Artificial Sequence
  Cyclic GFR-binding peptide
EPISILYLVGRKPKVKFKYEDEYDKVV

SEQ ID NO: 119662 - protein, 27 aa, Artificial Sequence
  Cyclic GFR-binding peptide
SATSMLYYDEYDKVVLRKHRDEYDKVV

SEQ ID NO: 119663 - protein, 27 aa, Artificial Sequence
  Cyclic GFR-binding peptide
EPISMLYLDENEKVVKFKYEDEYDKVV

SEQ ID NO: 119664 - protein, 27 aa, Artificial Sequence
  Cyclic GFR-binding peptide
EPISILYLDKGVVTYKFKYEDEYDKVV

SEQ ID NO: 119665 - protein, 27 aa, Artificial Sequence
  Cyclic GFR-binding peptide
SPINILYFDSANNVVYGKIPDEYDKVV

SEQ ID NO: 119666 - protein, 27 aa, Artificial Sequence
  Cyclic GFR-binding peptide
SPISMLYKNDKQQIILKYHYDEYDKVV

SEQ ID NO: 119667 - protein, 27 aa, Artificial Sequence
  Cyclic GFR-binding peptide
NAISILYFDSANNVVLKKYRDEYDKVV

SEQ ID NO: 119668 - protein, 27 aa, Artificial Sequence
  Cyclic GFR-binding peptide
SATSILYYDAANNVVLRKHRDEYDKVV

SEQ ID NO: 119669 - protein, 27 aa, Artificial Sequence
  Cyclic GFR-binding peptide
DEYDKVVSMEGIIIQQKDNMIQMTINS

SEQ ID NO: 119670 - protein, 27 aa, Artificial Sequence
  Cyclic GFR-binding peptide
DEYDKVVSMEGIIVNSSDDMIQVTINS

SEQ ID NO: 119671 - protein, 27 aa, Artificial Sequence
  Cyclic GFR-binding peptide
DEYDKVVSMEGLVKPKRGVMIQITINS

SEQ ID NO: 119672 - protein, 27 aa, Artificial Sequence
  Cyclic GFR-binding peptide
DEYDKVVSMEGLVVNNASDMIQITINS

SEQ ID NO: 119673 - protein, 29 aa, Artificial Sequence
  Cyclic GFR-binding peptide
DEYDKVVSMEGIFIPKKRVIEMIQVTINS

SEQ ID NO: 119674 - protein, 27 aa, Artificial Sequence
  Cyclic GFR-binding peptide
DEYDKVVSMEGILLVRGNDMIQMTINS

SEQ ID NO: 119675 - protein, 29 aa, Artificial Sequence
  Cyclic GFR-binding peptide
DEYDKVVSMEGILKPKKRVYEMIQVTINS

SEQ ID NO: 119676 - protein, 27 aa, Artificial Sequence
  Cyclic GFR-binding peptide
DEYDKVVSMEGLIKPTKGIMIQITINS

SEQ ID NO: 119677 - protein, 27 aa, Artificial Sequence
  Cyclic GFR-binding peptide
DEYDKVVSMEGLIVNSSDDMIQVTINS

SEQ ID NO: 119678 - protein, 29 aa, Artificial Sequence
  Cyclic GFR-binding peptide
DEYDKVVSMEGIHQGQHPKIRMIQMTINS

SEQ ID NO: 119679 - protein, 27 aa, Artificial Sequence
  Cyclic GFR-binding peptide
DEYDKVVSMEGIVVNNASDMIQITINS

SEQ ID NO: 119680 - protein, 29 aa, Artificial Sequence
  Cyclic GFR-binding peptide
DEYDKVVSMEGLLKPKKRVYEMIQVTINS

SEQ ID NO: 119681 - protein, 27 aa, Artificial Sequence
  Cyclic GFR-binding peptide
DEYDKVVSMEGIVKPKRGVMIQITINS

SEQ ID NO: 119682 - protein, 27 aa, Artificial Sequence
  Cyclic GFR-binding peptide
DEYDKVVSMEGIVKPTRGVMIQITINS

SEQ ID NO: 119683 - protein, 27 aa, Artificial Sequence
  Cyclic GFR-binding peptide
DEYDKVVSMEGLVVNNAADMIQITINS

SEQ ID NO: 119684 - protein, 27 aa, Artificial Sequence
  Cyclic GFR-binding peptide
DEYDKVVSMEGLLLVRGNDMIQMTINS

SEQ ID NO: 119685 - protein, 27 aa, Artificial Sequence
  Cyclic GFR-binding peptide
DEYDKVVSMEGIIKPTKGIMIQITINS

SEQ ID NO: 119686 - protein, 27 aa, Artificial Sequence
  Cyclic GFR-binding peptide
DEYDKVVSMEGLIIQQKDNMIQMTINS

SEQ ID NO: 119687 - protein, 29 aa, Artificial Sequence
  Cyclic GFR-binding peptide
DEYDKVVSMEGLHQGQHPKIRMIQMTINS

SEQ ID NO: 119688 - protein, 27 aa, Artificial Sequence
  Cyclic GFR-binding peptide
DEYDKVVSMEGIVVNNAADMIQITINS

SEQ ID NO: 119689 - protein, 29 aa, Artificial Sequence
  Cyclic GFR-binding peptide
DEYDKVVSMEGLFIPKKRVIEMIQVTINS

SEQ ID NO: 119690 - protein, 27 aa, Artificial Sequence
  Cyclic GFR-binding peptide
DEYDKVVSMEGLVKPTRGVMIQITINS

SEQ ID NO: 119691 - protein, 27 aa, Artificial Sequence
  Cyclic GFR-binding peptide
SNITMQIMNDKQQIIIGEMSDEYDKVV

SEQ ID NO: 119692 - protein, 27 aa, Artificial Sequence
  Cyclic GFR-binding peptide
SNITVQIMDDSSNVIIGEMSDEYDKVV

SEQ ID NO: 119693 - protein, 27 aa, Artificial Sequence
  Cyclic GFR-binding peptide
SNITIQIMVGRKPKVLGEMSDEYDKVV

SEQ ID NO: 119694 - protein, 27 aa, Artificial Sequence
  Cyclic GFR-binding peptide
SNITIQIMDSANNVVLGEMSDEYDKVV

SEQ ID NO: 119695 - protein, 29 aa, Artificial Sequence
  Cyclic GFR-binding peptide
SNITVQIMEIVRKKPIFIGEMSDEYDKVV

SEQ ID NO: 119696 - protein, 27 aa, Artificial Sequence
  Cyclic GFR-binding peptide
SNITMQIMDNGRVLLIGEMSDEYDKVV

SEQ ID NO: 119697 - protein, 29 aa, Artificial Sequence
  Cyclic GFR-binding peptide
SNITVQIMEYVRKKPKLIGEMSDEYDKVV

SEQ ID NO: 119698 - protein, 27 aa, Artificial Sequence
  Cyclic GFR-binding peptide
SNITIQIMIGKTPKILGEMSDEYDKVV

SEQ ID NO: 119699 - protein, 27 aa, Artificial Sequence
  Cyclic GFR-binding peptide
SNITVQIMDDSSNVILGEMSDEYDKVV

SEQ ID NO: 119700 - protein, 29 aa, Artificial Sequence
  Cyclic GFR-binding peptide
SNITMQIMRIKPHQGQHIGEMSDEYDKVV

SEQ ID NO: 119701 - protein, 27 aa, Artificial Sequence
  Cyclic GFR-binding peptide
SNITIQIMDSANNVVIGEMSDEYDKVV

SEQ ID NO: 119702 - protein, 29 aa, Artificial Sequence
  Cyclic GFR-binding peptide
SNITVQIMEYVRKKPKLLGEMSDEYDKVV

SEQ ID NO: 119703 - protein, 27 aa, Artificial Sequence
  Cyclic GFR-binding peptide
SNITIQIMVGRKPKVIGEMSDEYDKVV

SEQ ID NO: 119704 - protein, 27 aa, Artificial Sequence
  Cyclic GFR-binding peptide
SNITIQIMVGRTPKVIGEMSDEYDKVV

SEQ ID NO: 119705 - protein, 27 aa, Artificial Sequence
  Cyclic GFR-binding peptide
SNITIQIMDAANNVVLGEMSDEYDKVV

SEQ ID NO: 119706 - protein, 27 aa, Artificial Sequence
  Cyclic GFR-binding peptide
SNITMQIMDNGRVLLLGEMSDEYDKVV

SEQ ID NO: 119707 - protein, 27 aa, Artificial Sequence
  Cyclic GFR-binding peptide
SNITIQIMIGKTPKIIGEMSDEYDKVV

SEQ ID NO: 119708 - protein, 27 aa, Artificial Sequence
  Cyclic GFR-binding peptide
SNITMQIMNDKQQIILGEMSDEYDKVV

SEQ ID NO: 119709 - protein, 29 aa, Artificial Sequence
  Cyclic GFR-binding peptide
SNITMQIMRIKPHQGQHLGEMSDEYDKVV

SEQ ID NO: 119710 - protein, 27 aa, Artificial Sequence
  Cyclic GFR-binding peptide
SNITIQIMDAANNVVIGEMSDEYDKVV

SEQ ID NO: 119711 - protein, 29 aa, Artificial Sequence
  Cyclic GFR-binding peptide
SNITVQIMEIVRKKPIFLGEMSDEYDKVV

SEQ ID NO: 119712 - protein, 27 aa, Artificial Sequence
  Cyclic GFR-binding peptide
SNITIQIMVGRTPKVLGEMSDEYDKVV

SEQ ID NO: 119713 - protein, 27 aa, Artificial Sequence
  Cyclic GFR-binding peptide
DEYDKVVRYKKLIKPTKGIFYLISIAN

SEQ ID NO: 119714 - protein, 27 aa, Artificial Sequence
  Cyclic GFR-binding peptide
DEYDKVVQYNKLVVNKNEDLYLISIAS

SEQ ID NO: 119715 - protein, 27 aa, Artificial Sequence
  Cyclic GFR-binding peptide
DEYDKVVQYNKLVVNNAADLYLISIAS

SEQ ID NO: 119716 - protein, 27 aa, Artificial Sequence
  Cyclic GFR-binding peptide
DEYDKVVQYNKLIVNNSSDLYLVSIAS

SEQ ID NO: 119717 - protein, 27 aa, Artificial Sequence
  Cyclic GFR-binding peptide
DEYDKVVRYKKLVVKDYEDFYLMSIAN

SEQ ID NO: 119718 - protein, 27 aa, Artificial Sequence
  Cyclic GFR-binding peptide
DEYDKVVRYKKLVKPTRGVFYLISIAN

SEQ ID NO: 119719 - protein, 27 aa, Artificial Sequence
  Cyclic GFR-binding peptide
DEYDKVVQYNKLIIQQKDNLYLMSIAS

SEQ ID NO: 119720 - protein, 27 aa, Artificial Sequence
  Cyclic GFR-binding peptide
DEYDKVVQYNKLLLVRGNDLYLMSIAS

SEQ ID NO: 119721 - protein, 27 aa, Artificial Sequence
  Cyclic GFR-binding peptide
DEYDKVVQYNKLVKPTRGVLYLISIAS

SEQ ID NO: 119722 - protein, 27 aa, Artificial Sequence
  Cyclic GFR-binding peptide
DEYDKVVRYKKLVVKENEDFYLMSIAN

SEQ ID NO: 119723 - protein, 27 aa, Artificial Sequence
  Cyclic GFR-binding peptide
DEYDKVVRYKKLVVNNAADFYLISIAN

SEQ ID NO: 119724 - protein, 27 aa, Artificial Sequence
  Cyclic GFR-binding peptide
DEYDKVVQYNKLTPVGMDDLYLVSIAS

SEQ ID NO: 119725 - protein, 27 aa, Artificial Sequence
  Cyclic GFR-binding peptide
DEYDKVVRYKKLTPVGMDDFYLVSIAN

SEQ ID NO: 119726 - protein, 27 aa, Artificial Sequence
  Cyclic GFR-binding peptide
DEYDKVVRYKKLVKPKRGVFYLISIAN

SEQ ID NO: 119727 - protein, 27 aa, Artificial Sequence
  Cyclic GFR-binding peptide
DEYDKVVQYNKLVVKENEDLYLMSIAS

SEQ ID NO: 119728 - protein, 27 aa, Artificial Sequence
  Cyclic GFR-binding peptide
DEYDKVVRYKKLIIQQKDNFYLMSIAN

SEQ ID NO: 119729 - protein, 27 aa, Artificial Sequence
  Cyclic GFR-binding peptide
DEYDKVVQYNKLVKPKRGVLYLISIAS

SEQ ID NO: 119730 - protein, 27 aa, Artificial Sequence
  Cyclic GFR-binding peptide
DEYDKVVRYKKLIVNNSSDFYLVSIAN

SEQ ID NO: 119731 - protein, 27 aa, Artificial Sequence
  Cyclic GFR-binding peptide
DEYDKVVRYKKLYTVVGKDFYLISIAN

SEQ ID NO: 119732 - protein, 27 aa, Artificial Sequence
  Cyclic GFR-binding peptide
DEYDKVVRYKKLIVNSSDDFYLVSIAN

SEQ ID NO: 119733 - protein, 27 aa, Artificial Sequence
  Cyclic GFR-binding peptide
DEYDKVVRYKKLLLVRGNDFYLMSIAN

SEQ ID NO: 119734 - protein, 27 aa, Artificial Sequence
  Cyclic GFR-binding peptide
DEYDKVVQYNKLVVNNASDLYLISIAS

SEQ ID NO: 119735 - protein, 27 aa, Artificial Sequence
  Cyclic GFR-binding peptide
DEYDKVVQYNKLIKPTKGILYLISIAS

SEQ ID NO: 119736 - protein, 27 aa, Artificial Sequence
  Cyclic GFR-binding peptide
DEYDKVVRYKKLVVNKNEDFYLISIAN

SEQ ID NO: 119737 - protein, 27 aa, Artificial Sequence
  Cyclic GFR-binding peptide
DEYDKVVQYNKLYTVVGKDLYLISIAS

SEQ ID NO: 119738 - protein, 27 aa, Artificial Sequence
  Cyclic GFR-binding peptide
DEYDKVVQYNKLVVKDYEDLYLMSIAS

SEQ ID NO: 119739 - protein, 27 aa, Artificial Sequence
  Cyclic GFR-binding peptide
DEYDKVVRYKKLVVNNASDFYLISIAN

SEQ ID NO: 119740 - protein, 27 aa, Artificial Sequence
  Cyclic GFR-binding peptide
DEYDKVVQYNKLIVNSSDDLYLVSIAS

SEQ ID NO: 119741 - protein, 27 aa, Artificial Sequence
  Cyclic GFR-binding peptide
NAISILYFIGKTPKILKKYRDEYDKVV

SEQ ID NO: 119742 - protein, 27 aa, Artificial Sequence
  Cyclic GFR-binding peptide
SAISILYLDENKNVVLKNYQDEYDKVV

SEQ ID NO: 119743 - protein, 27 aa, Artificial Sequence
  Cyclic GFR-binding peptide
SAISILYLDAANNVVLKNYQDEYDKVV

SEQ ID NO: 119744 - protein, 27 aa, Artificial Sequence
  Cyclic GFR-binding peptide
SAISVLYLDSSNNVILKNYQDEYDKVV

SEQ ID NO: 119745 - protein, 27 aa, Artificial Sequence
  Cyclic GFR-binding peptide
NAISMLYFDEYDKVVLKKYRDEYDKVV

SEQ ID NO: 119746 - protein, 27 aa, Artificial Sequence
  Cyclic GFR-binding peptide
NAISILYFVGRTPKVLKKYRDEYDKVV

SEQ ID NO: 119747 - protein, 27 aa, Artificial Sequence
  Cyclic GFR-binding peptide
SAISMLYLNDKQQIILKNYQDEYDKVV

SEQ ID NO: 119748 - protein, 27 aa, Artificial Sequence
  Cyclic GFR-binding peptide
SAISMLYLDNGRVLLLKNYQDEYDKVV

SEQ ID NO: 119749 - protein, 27 aa, Artificial Sequence
  Cyclic GFR-binding peptide
SAISILYLVGRTPKVLKNYQDEYDKVV

SEQ ID NO: 119750 - protein, 27 aa, Artificial Sequence
  Cyclic GFR-binding peptide
NAISMLYFDENEKVVLKKYRDEYDKVV

SEQ ID NO: 119751 - protein, 27 aa, Artificial Sequence
  Cyclic GFR-binding peptide
NAISILYFDAANNVVLKKYRDEYDKVV

SEQ ID NO: 119752 - protein, 27 aa, Artificial Sequence
  Cyclic GFR-binding peptide
SAISVLYLDDMGVPTLKNYQDEYDKVV

SEQ ID NO: 119753 - protein, 27 aa, Artificial Sequence
  Cyclic GFR-binding peptide
NAISVLYFDDMGVPTLKKYRDEYDKVV

SEQ ID NO: 119754 - protein, 27 aa, Artificial Sequence
  Cyclic GFR-binding peptide
NAISILYFVGRKPKVLKKYRDEYDKVV

SEQ ID NO: 119755 - protein, 27 aa, Artificial Sequence
  Cyclic GFR-binding peptide
SAISMLYLDENEKVVLKNYQDEYDKVV

SEQ ID NO: 119756 - protein, 27 aa, Artificial Sequence
  Cyclic GFR-binding peptide
NAISMLYFNDKQQIILKKYRDEYDKVV

SEQ ID NO: 119757 - protein, 27 aa, Artificial Sequence
  Cyclic GFR-binding peptide
SAISILYLVGRKPKVLKNYQDEYDKVV

SEQ ID NO: 119758 - protein, 27 aa, Artificial Sequence
  Cyclic GFR-binding peptide
NAISVLYFDSSNNVILKKYRDEYDKVV

SEQ ID NO: 119759 - protein, 27 aa, Artificial Sequence
  Cyclic GFR-binding peptide
NAISILYFDKGVVTYLKKYRDEYDKVV

SEQ ID NO: 119760 - protein, 27 aa, Artificial Sequence
  Cyclic GFR-binding peptide
NAISVLYFDDSSNVILKKYRDEYDKVV

SEQ ID NO: 119761 - protein, 27 aa, Artificial Sequence
  Cyclic GFR-binding peptide
NAISMLYFDNGRVLLLKKYRDEYDKVV

SEQ ID NO: 119762 - protein, 27 aa, Artificial Sequence
  Cyclic GFR-binding peptide
SAISILYLDSANNVVLKNYQDEYDKVV

SEQ ID NO: 119763 - protein, 27 aa, Artificial Sequence
  Cyclic GFR-binding peptide
SAISILYLIGKTPKILKNYQDEYDKVV

SEQ ID NO: 119764 - protein, 27 aa, Artificial Sequence
  Cyclic GFR-binding peptide
NAISILYFDENKNVVLKKYRDEYDKVV

SEQ ID NO: 119765 - protein, 27 aa, Artificial Sequence
  Cyclic GFR-binding peptide
SAISILYLDKGVVTYLKNYQDEYDKVV

SEQ ID NO: 119766 - protein, 27 aa, Artificial Sequence
  Cyclic GFR-binding peptide
SAISMLYLDEYDKVVLKNYQDEYDKVV

SEQ ID NO: 119767 - protein, 27 aa, Artificial Sequence
  Cyclic GFR-binding peptide
NAISILYFDSANNVVLKKYRDEYDKVV

SEQ ID NO: 119768 - protein, 27 aa, Artificial Sequence
  Cyclic GFR-binding peptide
SAISVLYLDDSSNVILKNYQDEYDKVV

SEQ ID NO: 119769 - protein, 29 aa, Artificial Sequence
  Cyclic GFR-binding peptide
DEYDKVVVTAKKLKPKKRVYEIKRVQVPR

SEQ ID NO: 119770 - protein, 29 aa, Artificial Sequence
  Cyclic GFR-binding peptide
DEYDKVVVQVEKLKPKKRVYEVKAVKVSR

SEQ ID NO: 119771 - protein, 27 aa, Artificial Sequence
  Cyclic GFR-binding peptide
DEYDKVVVTAKKVKPTRGVIKRIQVPR

SEQ ID NO: 119772 - protein, 29 aa, Artificial Sequence
  Cyclic GFR-binding peptide
DEYDKVVVQVEKFIPKKRVIEVKAVKVSR

SEQ ID NO: 119773 - protein, 29 aa, Artificial Sequence
  Cyclic GFR-binding peptide
DEYDKVVVQVEKHQGQHPKIRVKAMKVSR

SEQ ID NO: 119774 - protein, 29 aa, Artificial Sequence
  Cyclic GFR-binding peptide
DEYDKVVVTAKKHQGQHPKIRIKRMQVPR

SEQ ID NO: 119775 - protein, 27 aa, Artificial Sequence
  Cyclic GFR-binding peptide
DEYDKVVVTAKKIKPTKGIIKRIQVPR

SEQ ID NO: 119776 - protein, 27 aa, Artificial Sequence
  Cyclic GFR-binding peptide
DEYDKVVVQVEKVKPKRGVVKAIKVSR

SEQ ID NO: 119777 - protein, 27 aa, Artificial Sequence
  Cyclic GFR-binding peptide
DEYDKVVVTAKKVKPKRGVIKRIQVPR

SEQ ID NO: 119778 - protein, 27 aa, Artificial Sequence
  Cyclic GFR-binding peptide
DEYDKVVVQVEKIKPTKGIVKAIKVSR

SEQ ID NO: 119779 - protein, 27 aa, Artificial Sequence
  Cyclic GFR-binding peptide
DEYDKVVVQVEKVKPTRGVVKAIKVSR

SEQ ID NO: 119780 - protein, 29 aa, Artificial Sequence
  Cyclic GFR-binding peptide
DEYDKVVVTAKKFIPKKRVIEIKRVQVPR

SEQ ID NO: 119781 - protein, 29 aa, Artificial Sequence
  Cyclic GFR-binding peptide
RPVQVRKIEYVRKKPKLKKATVDEYDKVV

SEQ ID NO: 119782 - protein, 29 aa, Artificial Sequence
  Cyclic GFR-binding peptide
RSVKVAKVEYVRKKPKLKEVQVDEYDKVV

SEQ ID NO: 119783 - protein, 27 aa, Artificial Sequence
  Cyclic GFR-binding peptide
RPVQIRKIVGRTPKVKKATVDEYDKVV

SEQ ID NO: 119784 - protein, 29 aa, Artificial Sequence
  Cyclic GFR-binding peptide
RSVKVAKVEIVRKKPIFKEVQVDEYDKVV

SEQ ID NO: 119785 - protein, 29 aa, Artificial Sequence
  Cyclic GFR-binding peptide
RSVKMAKVRIKPHQGQHKEVQVDEYDKVV

SEQ ID NO: 119786 - protein, 29 aa, Artificial Sequence
  Cyclic GFR-binding peptide
RPVQMRKIRIKPHQGQHKKATVDEYDKVV

SEQ ID NO: 119787 - protein, 27 aa, Artificial Sequence
  Cyclic GFR-binding peptide
RPVQIRKIIGKTPKIKKATVDEYDKVV

SEQ ID NO: 119788 - protein, 27 aa, Artificial Sequence
  Cyclic GFR-binding peptide
RSVKIAKVVGRKPKVKEVQVDEYDKVV

SEQ ID NO: 119789 - protein, 27 aa, Artificial Sequence
  Cyclic GFR-binding peptide
RPVQIRKIVGRKPKVKKATVDEYDKVV

SEQ ID NO: 119790 - protein, 27 aa, Artificial Sequence
  Cyclic GFR-binding peptide
RSVKIAKVIGKTPKIKEVQVDEYDKVV

SEQ ID NO: 119791 - protein, 27 aa, Artificial Sequence
  Cyclic GFR-binding peptide
RSVKIAKVVGRTPKVKEVQVDEYDKVV

SEQ ID NO: 119792 - protein, 29 aa, Artificial Sequence
  Cyclic GFR-binding peptide
RPVQVRKIEIVRKKPIFKKATVDEYDKVV

SEQ ID NO: 119793 - protein, 27 aa, Artificial Sequence
  Cyclic GFR-binding peptide
DDSSNVIRYKKLIKPTKGIFYLISIAN

SEQ ID NO: 119794 - protein, 29 aa, Artificial Sequence
  Cyclic GFR-binding peptide
DDSSNVIRHKRLFIPKKRVIEYYLVSTAS

SEQ ID NO: 119795 - protein, 27 aa, Artificial Sequence
  Cyclic GFR-binding peptide
DDSSNVIYHYKLVVKDYEDKYLMSIPS

SEQ ID NO: 119796 - protein, 27 aa, Artificial Sequence
  Cyclic GFR-binding peptide
DDSSNVIQYNKLIVNNSSDLYLVSIAS

SEQ ID NO: 119797 - protein, 27 aa, Artificial Sequence
  Cyclic GFR-binding peptide
DDSSNVIRYKKLVVKDYEDFYLMSIAN

SEQ ID NO: 119798 - protein, 27 aa, Artificial Sequence
  Cyclic GFR-binding peptide
DDSSNVIRYKKLVKPTRGVFYLISIAN

SEQ ID NO: 119799 - protein, 27 aa, Artificial Sequence
  Cyclic GFR-binding peptide
DDSSNVIRHKRLVVKENEDYYLMSTAS

SEQ ID NO: 119800 - protein, 27 aa, Artificial Sequence
  Cyclic GFR-binding peptide
DDSSNVIYHYKLIKPTKGIKYLISIPS

SEQ ID NO: 119801 - protein, 29 aa, Artificial Sequence
  Cyclic GFR-binding peptide
DDSSNVIRYKKLFIPKKRVIEFYLVSIAN

SEQ ID NO: 119802 - protein, 27 aa, Artificial Sequence
  Cyclic GFR-binding peptide
DDSSNVIYHYKLVVKENEDKYLMSIPS

SEQ ID NO: 119803 - protein, 27 aa, Artificial Sequence
  Cyclic GFR-binding peptide
DDSSNVIRHKRLVKPKRGVYYLISTAS

SEQ ID NO: 119804 - protein, 27 aa, Artificial Sequence
  Cyclic GFR-binding peptide
DDSSNVIYHYKLVKPKRGVKYLISIPS

SEQ ID NO: 119805 - protein, 29 aa, Artificial Sequence
  Cyclic GFR-binding peptide
DDSSNVIQYNKLFIPKKRVIELYLVSIAS

SEQ ID NO: 119806 - protein, 27 aa, Artificial Sequence
  Cyclic GFR-binding peptide
DDSSNVIQYNKLVKPTRGVLYLISIAS

SEQ ID NO: 119807 - protein, 27 aa, Artificial Sequence
  Cyclic GFR-binding peptide
DDSSNVIRYKKLVVKENEDFYLMSIAN

SEQ ID NO: 119808 - protein, 27 aa, Artificial Sequence
  Cyclic GFR-binding peptide
DDSSNVIQYNKLTPVGMDDLYLVSIAS

SEQ ID NO: 119809 - protein, 27 aa, Artificial Sequence
  Cyclic GFR-binding peptide
DDSSNVIRYKKLTPVGMDDFYLVSIAN

SEQ ID NO: 119810 - protein, 27 aa, Artificial Sequence
  Cyclic GFR-binding peptide
DDSSNVIRYKKLVKPKRGVFYLISIAN

SEQ ID NO: 119811 - protein, 27 aa, Artificial Sequence
  Cyclic GFR-binding peptide
DDSSNVIQYNKLVVKENEDLYLMSIAS

SEQ ID NO: 119812 - protein, 27 aa, Artificial Sequence
  Cyclic GFR-binding peptide
DDSSNVIYHYKLIVNSSDDKYLVSIPS

SEQ ID NO: 119813 - protein, 27 aa, Artificial Sequence
  Cyclic GFR-binding peptide
DDSSNVIQYNKLVKPKRGVLYLISIAS

SEQ ID NO: 119814 - protein, 27 aa, Artificial Sequence
  Cyclic GFR-binding peptide
DDSSNVIRYKKLIVNNSSDFYLVSIAN

SEQ ID NO: 119815 - protein, 27 aa, Artificial Sequence
  Cyclic GFR-binding peptide
DDSSNVIRYKKLIVNSSDDFYLVSIAN

SEQ ID NO: 119816 - protein, 27 aa, Artificial Sequence
  Cyclic GFR-binding peptide
DDSSNVIRHKRLVKPTRGVYYLISTAS

SEQ ID NO: 119817 - protein, 29 aa, Artificial Sequence
  Cyclic GFR-binding peptide
DDSSNVIYHYKLFIPKKRVIEKYLVSIPS

SEQ ID NO: 119818 - protein, 27 aa, Artificial Sequence
  Cyclic GFR-binding peptide
DDSSNVIRHKRLIKPTKGIYYLISTAS

SEQ ID NO: 119819 - protein, 27 aa, Artificial Sequence
  Cyclic GFR-binding peptide
DDSSNVIRHKRLTPVGMDDYYLVSTAS

SEQ ID NO: 119820 - protein, 27 aa, Artificial Sequence
  Cyclic GFR-binding peptide
DDSSNVIYHYKLTPVGMDDKYLVSIPS

SEQ ID NO: 119821 - protein, 27 aa, Artificial Sequence
  Cyclic GFR-binding peptide
DDSSNVIYHYKLIVNNSSDKYLVSIPS

SEQ ID NO: 119822 - protein, 27 aa, Artificial Sequence
  Cyclic GFR-binding peptide
DDSSNVIRHKRLIVNNSSDYYLVSTAS

SEQ ID NO: 119823 - protein, 27 aa, Artificial Sequence
  Cyclic GFR-binding peptide
DDSSNVIYHYKLVKPTRGVKYLISIPS

SEQ ID NO: 119824 - protein, 27 aa, Artificial Sequence
  Cyclic GFR-binding peptide
DDSSNVIRHKRLIVNSSDDYYLVSTAS

SEQ ID NO: 119825 - protein, 27 aa, Artificial Sequence
  Cyclic GFR-binding peptide
DDSSNVIRHKRLVVKDYEDYYLMSTAS

SEQ ID NO: 119826 - protein, 27 aa, Artificial Sequence
  Cyclic GFR-binding peptide
DDSSNVIQYNKLIKPTKGILYLISIAS

SEQ ID NO: 119827 - protein, 27 aa, Artificial Sequence
  Cyclic GFR-binding peptide
DDSSNVIQYNKLVVKDYEDLYLMSIAS

SEQ ID NO: 119828 - protein, 27 aa, Artificial Sequence
  Cyclic GFR-binding peptide
DDSSNVIQYNKLIVNSSDDLYLVSIAS

SEQ ID NO: 119829 - protein, 27 aa, Artificial Sequence
  Cyclic GFR-binding peptide
NAISILYFIGKTPKILKKYRDDSSNVI

SEQ ID NO: 119830 - protein, 29 aa, Artificial Sequence
  Cyclic GFR-binding peptide
SATSVLYYEIVRKKPIFLRKHRDDSSNVI

SEQ ID NO: 119831 - protein, 27 aa, Artificial Sequence
  Cyclic GFR-binding peptide
SPISMLYKDEYDKVVLKYHYDDSSNVI

SEQ ID NO: 119832 - protein, 27 aa, Artificial Sequence
  Cyclic GFR-binding peptide
SAISVLYLDSSNNVILKNYQDDSSNVI

SEQ ID NO: 119833 - protein, 27 aa, Artificial Sequence
  Cyclic GFR-binding peptide
NAISMLYFDEYDKVVLKKYRDDSSNVI

SEQ ID NO: 119834 - protein, 27 aa, Artificial Sequence
  Cyclic GFR-binding peptide
NAISILYFVGRTPKVLKKYRDDSSNVI

SEQ ID NO: 119835 - protein, 27 aa, Artificial Sequence
  Cyclic GFR-binding peptide
SATSMLYYDENEKVVLRKHRDDSSNVI

SEQ ID NO: 119836 - protein, 27 aa, Artificial Sequence
  Cyclic GFR-binding peptide
SPISILYKIGKTPKILKYHYDDSSNVI

SEQ ID NO: 119837 - protein, 29 aa, Artificial Sequence
  Cyclic GFR-binding peptide
NAISVLYFEIVRKKPIFLKKYRDDSSNVI

SEQ ID NO: 119838 - protein, 27 aa, Artificial Sequence
  Cyclic GFR-binding peptide
SPISMLYKDENEKVVLKYHYDDSSNVI

SEQ ID NO: 119839 - protein, 27 aa, Artificial Sequence
  Cyclic GFR-binding peptide
SATSILYYVGRKPKVLRKHRDDSSNVI

SEQ ID NO: 119840 - protein, 27 aa, Artificial Sequence
  Cyclic GFR-binding peptide
SPISILYKVGRKPKVLKYHYDDSSNVI

SEQ ID NO: 119841 - protein, 29 aa, Artificial Sequence
  Cyclic GFR-binding peptide
SAISVLYLEIVRKKPIFLKNYQDDSSNVI

SEQ ID NO: 119842 - protein, 27 aa, Artificial Sequence
  Cyclic GFR-binding peptide
SAISILYLVGRTPKVLKNYQDDSSNVI

SEQ ID NO: 119843 - protein, 27 aa, Artificial Sequence
  Cyclic GFR-binding peptide
NAISMLYFDENEKVVLKKYRDDSSNVI

SEQ ID NO: 119844 - protein, 27 aa, Artificial Sequence
  Cyclic GFR-binding peptide
SAISVLYLDDMGVPTLKNYQDDSSNVI

SEQ ID NO: 119845 - protein, 27 aa, Artificial Sequence
  Cyclic GFR-binding peptide
NAISVLYFDDMGVPTLKKYRDDSSNVI

SEQ ID NO: 119846 - protein, 27 aa, Artificial Sequence
  Cyclic GFR-binding peptide
NAISILYFVGRKPKVLKKYRDDSSNVI

SEQ ID NO: 119847 - protein, 27 aa, Artificial Sequence
  Cyclic GFR-binding peptide
SAISMLYLDENEKVVLKNYQDDSSNVI

SEQ ID NO: 119848 - protein, 27 aa, Artificial Sequence
  Cyclic GFR-binding peptide
SPISVLYKDDSSNVILKYHYDDSSNVI

SEQ ID NO: 119849 - protein, 27 aa, Artificial Sequence
  Cyclic GFR-binding peptide
SAISILYLVGRKPKVLKNYQDDSSNVI

SEQ ID NO: 119850 - protein, 27 aa, Artificial Sequence
  Cyclic GFR-binding peptide
NAISVLYFDSSNNVILKKYRDDSSNVI

SEQ ID NO: 119851 - protein, 27 aa, Artificial Sequence
  Cyclic GFR-binding peptide
NAISVLYFDDSSNVILKKYRDDSSNVI

SEQ ID NO: 119852 - protein, 27 aa, Artificial Sequence
  Cyclic GFR-binding peptide
SATSILYYVGRTPKVLRKHRDDSSNVI

SEQ ID NO: 119853 - protein, 29 aa, Artificial Sequence
  Cyclic GFR-binding peptide
SPISVLYKEIVRKKPIFLKYHYDDSSNVI

SEQ ID NO: 119854 - protein, 27 aa, Artificial Sequence
  Cyclic GFR-binding peptide
SATSILYYIGKTPKILRKHRDDSSNVI

SEQ ID NO: 119855 - protein, 27 aa, Artificial Sequence
  Cyclic GFR-binding peptide
SATSVLYYDDMGVPTLRKHRDDSSNVI

SEQ ID NO: 119856 - protein, 27 aa, Artificial Sequence
  Cyclic GFR-binding peptide
SPISVLYKDDMGVPTLKYHYDDSSNVI

SEQ ID NO: 119857 - protein, 27 aa, Artificial Sequence
  Cyclic GFR-binding peptide
SPISVLYKDSSNNVILKYHYDDSSNVI

SEQ ID NO: 119858 - protein, 27 aa, Artificial Sequence
  Cyclic GFR-binding peptide
SATSVLYYDSSNNVILRKHRDDSSNVI

SEQ ID NO: 119859 - protein, 27 aa, Artificial Sequence
  Cyclic GFR-binding peptide
SPISILYKVGRTPKVLKYHYDDSSNVI

SEQ ID NO: 119860 - protein, 27 aa, Artificial Sequence
  Cyclic GFR-binding peptide
SATSVLYYDDSSNVILRKHRDDSSNVI

SEQ ID NO: 119861 - protein, 27 aa, Artificial Sequence
  Cyclic GFR-binding peptide
SATSMLYYDEYDKVVLRKHRDDSSNVI

SEQ ID NO: 119862 - protein, 27 aa, Artificial Sequence
  Cyclic GFR-binding peptide
SAISILYLIGKTPKILKNYQDDSSNVI

SEQ ID NO: 119863 - protein, 27 aa, Artificial Sequence
  Cyclic GFR-binding peptide
SAISMLYLDEYDKVVLKNYQDDSSNVI

SEQ ID NO: 119864 - protein, 27 aa, Artificial Sequence
  Cyclic GFR-binding peptide
SAISVLYLDDSSNVILKNYQDDSSNVI

SEQ ID NO: 119865 - protein, 27 aa, Artificial Sequence
  Cyclic GFR-binding peptide
DDSSNVIRYKKLIKPTKGIFYLISIAN

SEQ ID NO: 119866 - protein, 27 aa, Artificial Sequence
  Cyclic GFR-binding peptide
DDSSNVINSLQEVVKDYEDYYLMTLPE

SEQ ID NO: 119867 - protein, 27 aa, Artificial Sequence
  Cyclic GFR-binding peptide
DDSSNVINSLQEIKPTKGIYYVIPLPE

SEQ ID NO: 119868 - protein, 27 aa, Artificial Sequence
  Cyclic GFR-binding peptide
DDSSNVINSLQEVKPKRGVYYLITLPE

SEQ ID NO: 119869 - protein, 27 aa, Artificial Sequence
  Cyclic GFR-binding peptide
DDSSNVINSLQEVKPTRGVYYVIPLPE

SEQ ID NO: 119870 - protein, 27 aa, Artificial Sequence
  Cyclic GFR-binding peptide
DDSSNVIRYKKLVVKDYEDFYLMSIAN

SEQ ID NO: 119871 - protein, 27 aa, Artificial Sequence
  Cyclic GFR-binding peptide
DDSSNVIEYQKYIVNSSDDIFLVSIPS

SEQ ID NO: 119872 - protein, 27 aa, Artificial Sequence
  Cyclic GFR-binding peptide
DDSSNVIEYQKYVKPTRGVIFLISIPS

SEQ ID NO: 119873 - protein, 27 aa, Artificial Sequence
  Cyclic GFR-binding peptide
DDSSNVINSLQEVVKENEDYYLMTLPE

SEQ ID NO: 119874 - protein, 27 aa, Artificial Sequence
  Cyclic GFR-binding peptide
DDSSNVIRYKKLVKPTRGVFYLISIAN

SEQ ID NO: 119875 - protein, 27 aa, Artificial Sequence
  Cyclic GFR-binding peptide
DDSSNVINSLQEVVNNASDYYLITLPE

SEQ ID NO: 119876 - protein, 27 aa, Artificial Sequence
  Cyclic GFR-binding peptide
DDSSNVINSLQEVKPKRGVYYVIPLPE

SEQ ID NO: 119877 - protein, 27 aa, Artificial Sequence
  Cyclic GFR-binding peptide
DDSSNVINSLQEVVNNASDYYVIPLPE

SEQ ID NO: 119878 - protein, 27 aa, Artificial Sequence
  Cyclic GFR-binding peptide
DDSSNVINSLQEVKPTRGVYYLITLPE

SEQ ID NO: 119879 - protein, 27 aa, Artificial Sequence
  Cyclic GFR-binding peptide
DDSSNVIQYNKLVKPTRGVLYLISIAS

SEQ ID NO: 119880 - protein, 27 aa, Artificial Sequence
  Cyclic GFR-binding peptide
DDSSNVIRYKKLVVKENEDFYLMSIAN

SEQ ID NO: 119881 - protein, 27 aa, Artificial Sequence
  Cyclic GFR-binding peptide
DDSSNVIEYQKYIKPTKGIIFLISIPS

SEQ ID NO: 119882 - protein, 27 aa, Artificial Sequence
  Cyclic GFR-binding peptide
DDSSNVIEYQKYVVNNASDIFLISIPS

SEQ ID NO: 119883 - protein, 27 aa, Artificial Sequence
  Cyclic GFR-binding peptide
DDSSNVIRYKKLVKPKRGVFYLISIAN

SEQ ID NO: 119884 - protein, 27 aa, Artificial Sequence
  Cyclic GFR-binding peptide
DDSSNVINSLQEIVNSSDDYYVVPLPE

SEQ ID NO: 119885 - protein, 27 aa, Artificial Sequence
  Cyclic GFR-binding peptide
DDSSNVINSLQEVVKDYEDYYVMPLPE

SEQ ID NO: 119886 - protein, 27 aa, Artificial Sequence
  Cyclic GFR-binding peptide
DDSSNVIQYNKLVVKENEDLYLMSIAS

SEQ ID NO: 119887 - protein, 27 aa, Artificial Sequence
  Cyclic GFR-binding peptide
DDSSNVIEYQKYVVKENEDIFLMSIPS

SEQ ID NO: 119888 - protein, 27 aa, Artificial Sequence
  Cyclic GFR-binding peptide
DDSSNVIQYNKLVKPKRGVLYLISIAS

SEQ ID NO: 119889 - protein, 27 aa, Artificial Sequence
  Cyclic GFR-binding peptide
DDSSNVIRYKKLIVNSSDDFYLVSIAN

SEQ ID NO: 119890 - protein, 27 aa, Artificial Sequence
  Cyclic GFR-binding peptide
DDSSNVINSLQEVVKENEDYYVMPLPE

SEQ ID NO: 119891 - protein, 27 aa, Artificial Sequence
  Cyclic GFR-binding peptide
DDSSNVIEYQKYVVKDYEDIFLMSIPS

SEQ ID NO: 119892 - protein, 27 aa, Artificial Sequence
  Cyclic GFR-binding peptide
DDSSNVIQYNKLVVNNASDLYLISIAS

SEQ ID NO: 119893 - protein, 27 aa, Artificial Sequence
  Cyclic GFR-binding peptide
DDSSNVIQYNKLIKPTKGILYLISIAS

SEQ ID NO: 119894 - protein, 27 aa, Artificial Sequence
  Cyclic GFR-binding peptide
DDSSNVINSLQEIKPTKGIYYLITLPE

SEQ ID NO: 119895 - protein, 27 aa, Artificial Sequence
  Cyclic GFR-binding peptide
DDSSNVIEYQKYVKPKRGVIFLISIPS

SEQ ID NO: 119896 - protein, 27 aa, Artificial Sequence
  Cyclic GFR-binding peptide
DDSSNVIQYNKLVVKDYEDLYLMSIAS

SEQ ID NO: 119897 - protein, 27 aa, Artificial Sequence
  Cyclic GFR-binding peptide
DDSSNVIRYKKLVVNNASDFYLISIAN

SEQ ID NO: 119898 - protein, 27 aa, Artificial Sequence
  Cyclic GFR-binding peptide
DDSSNVINSLQEIVNSSDDYYLVTLPE

SEQ ID NO: 119899 - protein, 27 aa, Artificial Sequence
  Cyclic GFR-binding peptide
DDSSNVIQYNKLIVNSSDDLYLVSIAS

SEQ ID NO: 119900 - protein, 27 aa, Artificial Sequence
  Cyclic GFR-binding peptide
NAISILYFIGKTPKILKKYRDDSSNVI

SEQ ID NO: 119901 - protein, 27 aa, Artificial Sequence
  Cyclic GFR-binding peptide
EPLTMLYYDEYDKVVEQLSNDDSSNVI

SEQ ID NO: 119902 - protein, 27 aa, Artificial Sequence
  Cyclic GFR-binding peptide
EPLPIVYYIGKTPKIEQLSNDDSSNVI

SEQ ID NO: 119903 - protein, 27 aa, Artificial Sequence
  Cyclic GFR-binding peptide
EPLTILYYVGRKPKVEQLSNDDSSNVI

SEQ ID NO: 119904 - protein, 27 aa, Artificial Sequence
  Cyclic GFR-binding peptide
EPLPIVYYVGRTPKVEQLSNDDSSNVI

SEQ ID NO: 119905 - protein, 27 aa, Artificial Sequence
  Cyclic GFR-binding peptide
NAISMLYFDEYDKVVLKKYRDDSSNVI

SEQ ID NO: 119906 - protein, 27 aa, Artificial Sequence
  Cyclic GFR-binding peptide
SPISVLFIDDSSNVIYKQYEDDSSNVI

SEQ ID NO: 119907 - protein, 27 aa, Artificial Sequence
  Cyclic GFR-binding peptide
SPISILFIVGRTPKVYKQYEDDSSNVI

SEQ ID NO: 119908 - protein, 27 aa, Artificial Sequence
  Cyclic GFR-binding peptide
EPLTMLYYDENEKVVEQLSNDDSSNVI

SEQ ID NO: 119909 - protein, 27 aa, Artificial Sequence
  Cyclic GFR-binding peptide
NAISILYFVGRTPKVLKKYRDDSSNVI

SEQ ID NO: 119910 - protein, 27 aa, Artificial Sequence
  Cyclic GFR-binding peptide
EPLTILYYDSANNVVEQLSNDDSSNVI

SEQ ID NO: 119911 - protein, 27 aa, Artificial Sequence
  Cyclic GFR-binding peptide
EPLPIVYYVGRKPKVEQLSNDDSSNVI

SEQ ID NO: 119912 - protein, 27 aa, Artificial Sequence
  Cyclic GFR-binding peptide
EPLPIVYYDSANNVVEQLSNDDSSNVI

SEQ ID NO: 119913 - protein, 27 aa, Artificial Sequence
  Cyclic GFR-binding peptide
EPLTILYYVGRTPKVEQLSNDDSSNVI

SEQ ID NO: 119914 - protein, 27 aa, Artificial Sequence
  Cyclic GFR-binding peptide
SAISILYLVGRTPKVLKNYQDDSSNVI

SEQ ID NO: 119915 - protein, 27 aa, Artificial Sequence
  Cyclic GFR-binding peptide
NAISMLYFDENEKVVLKKYRDDSSNVI

SEQ ID NO: 119916 - protein, 27 aa, Artificial Sequence
  Cyclic GFR-binding peptide
SPISILFIIGKTPKIYKQYEDDSSNVI

SEQ ID NO: 119917 - protein, 27 aa, Artificial Sequence
  Cyclic GFR-binding peptide
SPISILFIDSANNVVYKQYEDDSSNVI

SEQ ID NO: 119918 - protein, 27 aa, Artificial Sequence
  Cyclic GFR-binding peptide
NAISILYFVGRKPKVLKKYRDDSSNVI

SEQ ID NO: 119919 - protein, 27 aa, Artificial Sequence
  Cyclic GFR-binding peptide
EPLPVVYYDDSSNVIEQLSNDDSSNVI

SEQ ID NO: 119920 - protein, 27 aa, Artificial Sequence
  Cyclic GFR-binding peptide
EPLPMVYYDEYDKVVEQLSNDDSSNVI

SEQ ID NO: 119921 - protein, 27 aa, Artificial Sequence
  Cyclic GFR-binding peptide
SAISMLYLDENEKVVLKNYQDDSSNVI

SEQ ID NO: 119922 - protein, 27 aa, Artificial Sequence
  Cyclic GFR-binding peptide
SPISMLFIDENEKVVYKQYEDDSSNVI

SEQ ID NO: 119923 - protein, 27 aa, Artificial Sequence
  Cyclic GFR-binding peptide
SAISILYLVGRKPKVLKNYQDDSSNVI

SEQ ID NO: 119924 - protein, 27 aa, Artificial Sequence
  Cyclic GFR-binding peptide
NAISVLYFDDSSNVILKKYRDDSSNVI

SEQ ID NO: 119925 - protein, 27 aa, Artificial Sequence
  Cyclic GFR-binding peptide
EPLPMVYYDENEKVVEQLSNDDSSNVI

SEQ ID NO: 119926 - protein, 27 aa, Artificial Sequence
  Cyclic GFR-binding peptide
SPISMLFIDEYDKVVYKQYEDDSSNVI

SEQ ID NO: 119927 - protein, 27 aa, Artificial Sequence
  Cyclic GFR-binding peptide
SAISILYLDSANNVVLKNYQDDSSNVI

SEQ ID NO: 119928 - protein, 27 aa, Artificial Sequence
  Cyclic GFR-binding peptide
SAISILYLIGKTPKILKNYQDDSSNVI

SEQ ID NO: 119929 - protein, 27 aa, Artificial Sequence
  Cyclic GFR-binding peptide
EPLTILYYIGKTPKIEQLSNDDSSNVI

SEQ ID NO: 119930 - protein, 27 aa, Artificial Sequence
  Cyclic GFR-binding peptide
SPISILFIVGRKPKVYKQYEDDSSNVI

SEQ ID NO: 119931 - protein, 27 aa, Artificial Sequence
  Cyclic GFR-binding peptide
SAISMLYLDEYDKVVLKNYQDDSSNVI

SEQ ID NO: 119932 - protein, 27 aa, Artificial Sequence
  Cyclic GFR-binding peptide
NAISILYFDSANNVVLKKYRDDSSNVI

SEQ ID NO: 119933 - protein, 27 aa, Artificial Sequence
  Cyclic GFR-binding peptide
EPLTVLYYDDSSNVIEQLSNDDSSNVI

SEQ ID NO: 119934 - protein, 27 aa, Artificial Sequence
  Cyclic GFR-binding peptide
SAISVLYLDDSSNVILKNYQDDSSNVI

SEQ ID NO: 119935 - protein, 29 aa, Artificial Sequence
  Cyclic GFR-binding peptide
DDSSNVIVTAKKLKPKKRVYEIKRVQVPR

SEQ ID NO: 119936 - protein, 29 aa, Artificial Sequence
  Cyclic GFR-binding peptide
DDSSNVIVQVEKLKPKKRVYEVKAVKVSR

SEQ ID NO: 119937 - protein, 29 aa, Artificial Sequence
  Cyclic GFR-binding peptide
DDSSNVIVQVEKFIPKKRVIEVKAVKVSR

SEQ ID NO: 119938 - protein, 29 aa, Artificial Sequence
  Cyclic GFR-binding peptide
DDSSNVIVQVEKHQGQHPKIRVKAMKVSR

SEQ ID NO: 119939 - protein, 29 aa, Artificial Sequence
  Cyclic GFR-binding peptide
DDSSNVIVTAKKHQGQHPKIRIKRMQVPR

SEQ ID NO: 119940 - protein, 29 aa, Artificial Sequence
  Cyclic GFR-binding peptide
DDSSNVISMEGLLKPKKRVYEMIQVTINS

SEQ ID NO: 119941 - protein, 29 aa, Artificial Sequence
  Cyclic GFR-binding peptide
DDSSNVISMEGIFIPKKRVIEMIQVTINS

SEQ ID NO: 119942 - protein, 29 aa, Artificial Sequence
  Cyclic GFR-binding peptide
DDSSNVISMEGLHQGQHPKIRMIQMTINS

SEQ ID NO: 119943 - protein, 29 aa, Artificial Sequence
  Cyclic GFR-binding peptide
DDSSNVISMEGILKPKKRVYEMIQVTINS

SEQ ID NO: 119944 - protein, 29 aa, Artificial Sequence
  Cyclic GFR-binding peptide
DDSSNVISMEGLFIPKKRVIEMIQVTINS

SEQ ID NO: 119945 - protein, 29 aa, Artificial Sequence
  Cyclic GFR-binding peptide
DDSSNVIVTAKKFIPKKRVIEIKRVQVPR

SEQ ID NO: 119946 - protein, 29 aa, Artificial Sequence
  Cyclic GFR-binding peptide
DDSSNVISMEGIHQGQHPKIRMIQMTINS

SEQ ID NO: 119947 - protein, 29 aa, Artificial Sequence
  Cyclic GFR-binding peptide
RPVQVRKIEYVRKKPKLKKATVDDSSNVI

SEQ ID NO: 119948 - protein, 29 aa, Artificial Sequence
  Cyclic GFR-binding peptide
RSVKVAKVEYVRKKPKLKEVQVDDSSNVI

SEQ ID NO: 119949 - protein, 29 aa, Artificial Sequence
  Cyclic GFR-binding peptide
RSVKVAKVEIVRKKPIFKEVQVDDSSNVI

SEQ ID NO: 119950 - protein, 29 aa, Artificial Sequence
  Cyclic GFR-binding peptide
RSVKMAKVRIKPHQGQHKEVQVDDSSNVI

SEQ ID NO: 119951 - protein, 29 aa, Artificial Sequence
  Cyclic GFR-binding peptide
RPVQMRKIRIKPHQGQHKKATVDDSSNVI

SEQ ID NO: 119952 - protein, 29 aa, Artificial Sequence
  Cyclic GFR-binding peptide
SNITVQIMEYVRKKPKLLGEMSDDSSNVI

SEQ ID NO: 119953 - protein, 29 aa, Artificial Sequence
  Cyclic GFR-binding peptide
SNITVQIMEIVRKKPIFIGEMSDDSSNVI

SEQ ID NO: 119954 - protein, 29 aa, Artificial Sequence
  Cyclic GFR-binding peptide
SNITMQIMRIKPHQGQHLGEMSDDSSNVI

SEQ ID NO: 119955 - protein, 29 aa, Artificial Sequence
  Cyclic GFR-binding peptide
SNITVQIMEYVRKKPKLIGEMSDDSSNVI

SEQ ID NO: 119956 - protein, 29 aa, Artificial Sequence
  Cyclic GFR-binding peptide
SNITVQIMEIVRKKPIFLGEMSDDSSNVI

SEQ ID NO: 119957 - protein, 29 aa, Artificial Sequence
  Cyclic GFR-binding peptide
RPVQVRKIEIVRKKPIFKKATVDDSSNVI

SEQ ID NO: 119958 - protein, 29 aa, Artificial Sequence
  Cyclic GFR-binding peptide
SNITMQIMRIKPHQGQHIGEMSDDSSNVI

SEQ ID NO: 119959 - protein, 29 aa, Artificial Sequence
  Cyclic GFR-binding peptide
DDSSNVIVTAKKLKPKKRVYEIKRVQVPR

SEQ ID NO: 119960 - protein, 29 aa, Artificial Sequence
  Cyclic GFR-binding peptide
DDSSNVIVQVEKLKPKKRVYEVKAVKVSR

SEQ ID NO: 119961 - protein, 29 aa, Artificial Sequence
  Cyclic GFR-binding peptide
DDSSNVIVQVEKFIPKKRVIEVKAVKVSR

SEQ ID NO: 119962 - protein, 29 aa, Artificial Sequence
  Cyclic GFR-binding peptide
DDSSNVIVQVEKHQGQHPKIRVKAMKVSR

SEQ ID NO: 119963 - protein, 29 aa, Artificial Sequence
  Cyclic GFR-binding peptide
DDSSNVIVTAKKHQGQHPKIRIKRMQVPR

SEQ ID NO: 119964 - protein, 29 aa, Artificial Sequence
  Cyclic GFR-binding peptide
DDSSNVISMEGLLKPKKRVYEMIQVTINS

SEQ ID NO: 119965 - protein, 29 aa, Artificial Sequence
  Cyclic GFR-binding peptide
DDSSNVISMEGIFIPKKRVIEMIQVTINS

SEQ ID NO: 119966 - protein, 29 aa, Artificial Sequence
  Cyclic GFR-binding peptide
DDSSNVISMEGLHQGQHPKIRMIQMTINS

SEQ ID NO: 119967 - protein, 29 aa, Artificial Sequence
  Cyclic GFR-binding peptide
DDSSNVISMEGILKPKKRVYEMIQVTINS

SEQ ID NO: 119968 - protein, 29 aa, Artificial Sequence
  Cyclic GFR-binding peptide
DDSSNVISMEGLFIPKKRVIEMIQVTINS

SEQ ID NO: 119969 - protein, 29 aa, Artificial Sequence
  Cyclic GFR-binding peptide
DDSSNVIVTAKKFIPKKRVIEIKRVQVPR

SEQ ID NO: 119970 - protein, 29 aa, Artificial Sequence
  Cyclic GFR-binding peptide
DDSSNVISMEGIHQGQHPKIRMIQMTINS

SEQ ID NO: 119971 - protein, 29 aa, Artificial Sequence
  Cyclic GFR-binding peptide
RPVQVRKIEYVRKKPKLKKATVDDSSNVI

SEQ ID NO: 119972 - protein, 29 aa, Artificial Sequence
  Cyclic GFR-binding peptide
RSVKVAKVEYVRKKPKLKEVQVDDSSNVI

SEQ ID NO: 119973 - protein, 29 aa, Artificial Sequence
  Cyclic GFR-binding peptide
RSVKVAKVEIVRKKPIFKEVQVDDSSNVI

SEQ ID NO: 119974 - protein, 29 aa, Artificial Sequence
  Cyclic GFR-binding peptide
RSVKMAKVRIKPHQGQHKEVQVDDSSNVI

SEQ ID NO: 119975 - protein, 29 aa, Artificial Sequence
  Cyclic GFR-binding peptide
RPVQMRKIRIKPHQGQHKKATVDDSSNVI

SEQ ID NO: 119976 - protein, 29 aa, Artificial Sequence
  Cyclic GFR-binding peptide
SNITVQIMEYVRKKPKLLGEMSDDSSNVI

SEQ ID NO: 119977 - protein, 29 aa, Artificial Sequence
  Cyclic GFR-binding peptide
SNITVQIMEIVRKKPIFIGEMSDDSSNVI

SEQ ID NO: 119978 - protein, 29 aa, Artificial Sequence
  Cyclic GFR-binding peptide
SNITMQIMRIKPHQGQHLGEMSDDSSNVI

SEQ ID NO: 119979 - protein, 29 aa, Artificial Sequence
  Cyclic GFR-binding peptide
SNITVQIMEYVRKKPKLIGEMSDDSSNVI

SEQ ID NO: 119980 - protein, 29 aa, Artificial Sequence
  Cyclic GFR-binding peptide
SNITVQIMEIVRKKPIFLGEMSDDSSNVI

SEQ ID NO: 119981 - protein, 29 aa, Artificial Sequence
  Cyclic GFR-binding peptide
RPVQVRKIEIVRKKPIFKKATVDDSSNVI

SEQ ID NO: 119982 - protein, 29 aa, Artificial Sequence
  Cyclic GFR-binding peptide
SNITMQIMRIKPHQGQHIGEMSDDSSNVI

SEQ ID NO: 119983 - protein, 27 aa, Artificial Sequence
  Cyclic GFR-binding peptide
DDSSNVIEYQKYVVKENEDIYLMSIPS

SEQ ID NO: 119984 - protein, 27 aa, Artificial Sequence
  Cyclic GFR-binding peptide
DDSSNVIRYKKLIKPTKGIFYLISIAN

SEQ ID NO: 119985 - protein, 27 aa, Artificial Sequence
  Cyclic GFR-binding peptide
DDSSNVIEYKFKVKPTRGVLYLISIPE

SEQ ID NO: 119986 - protein, 27 aa, Artificial Sequence
  Cyclic GFR-binding peptide
DDSSNVIYHYKLVVKDYEDKYLMSIPS

SEQ ID NO: 119987 - protein, 27 aa, Artificial Sequence
  Cyclic GFR-binding peptide
DDSSNVIEYKFKTPVGMDDLYLVSIPE

SEQ ID NO: 119988 - protein, 27 aa, Artificial Sequence
  Cyclic GFR-binding peptide
DDSSNVIEYQKYVKPKRGVIYLISIPS

SEQ ID NO: 119989 - protein, 27 aa, Artificial Sequence
  Cyclic GFR-binding peptide
DDSSNVIRYKKLVVKDYEDFYLMSIAN

SEQ ID NO: 119990 - protein, 27 aa, Artificial Sequence
  Cyclic GFR-binding peptide
DDSSNVIEYQKYVVKDYEDIYLMSIPS

SEQ ID NO: 119991 - protein, 27 aa, Artificial Sequence
  Cyclic GFR-binding peptide
DDSSNVIRYKKLVKPTRGVFYLISIAN

SEQ ID NO: 119992 - protein, 27 aa, Artificial Sequence
  Cyclic GFR-binding peptide
DDSSNVIYHYKLIKPTKGIKYLISIPS

SEQ ID NO: 119993 - protein, 27 aa, Artificial Sequence
  Cyclic GFR-binding peptide
DDSSNVIYHYKLVVKENEDKYLMSIPS

SEQ ID NO: 119994 - protein, 27 aa, Artificial Sequence
  Cyclic GFR-binding peptide
DDSSNVIYHYKLVKPKRGVKYLISIPS

SEQ ID NO: 119995 - protein, 27 aa, Artificial Sequence
  Cyclic GFR-binding peptide
DDSSNVIEYKFKIKPTKGILYLISIPE

SEQ ID NO: 119996 - protein, 27 aa, Artificial Sequence
  Cyclic GFR-binding peptide
DDSSNVIEYQKYIKPTKGIIYLISIPS

SEQ ID NO: 119997 - protein, 27 aa, Artificial Sequence
  Cyclic GFR-binding peptide
DDSSNVIRYKKLVVKENEDFYLMSIAN

SEQ ID NO: 119998 - protein, 27 aa, Artificial Sequence
  Cyclic GFR-binding peptide
DDSSNVIRYKKLVVNNAADFYLISIAN

SEQ ID NO: 119999 - protein, 27 aa, Artificial Sequence
  Cyclic GFR-binding peptide
DDSSNVIYHYKLYTVVGKDKYLISIPS

SEQ ID NO: 120000 - protein, 27 aa, Artificial Sequence
  Cyclic GFR-binding peptide
DDSSNVIRYKKLTPVGMDDFYLVSIAN

SEQ ID NO: 120001 - protein, 27 aa, Artificial Sequence
  Cyclic GFR-binding peptide
DDSSNVIRYKKLVKPKRGVFYLISIAN

SEQ ID NO: 120002 - protein, 27 aa, Artificial Sequence
  Cyclic GFR-binding peptide
DDSSNVIYHYKLVVNNAADKYLISIPS

SEQ ID NO: 120003 - protein, 27 aa, Artificial Sequence
  Cyclic GFR-binding peptide
DDSSNVIYHYKLIVNSSDDKYLVSIPS

SEQ ID NO: 120004 - protein, 27 aa, Artificial Sequence
  Cyclic GFR-binding peptide
DDSSNVIRYKKLIVNNSSDFYLVSIAN

SEQ ID NO: 120005 - protein, 27 aa, Artificial Sequence
  Cyclic GFR-binding peptide
DDSSNVIRYKKLYTVVGKDFYLISIAN

SEQ ID NO: 120006 - protein, 27 aa, Artificial Sequence
  Cyclic GFR-binding peptide
DDSSNVIEYQKYVVNNAADIYLISIPS

SEQ ID NO: 120007 - protein, 27 aa, Artificial Sequence
  Cyclic GFR-binding peptide
DDSSNVIRYKKLIVNSSDDFYLVSIAN

SEQ ID NO: 120008 - protein, 27 aa, Artificial Sequence
  Cyclic GFR-binding peptide
DDSSNVIEYKFKIVNNSSDLYLVSIPE

SEQ ID NO: 120009 - protein, 27 aa, Artificial Sequence
  Cyclic GFR-binding peptide
DDSSNVIEYQKYVKPTRGVIYLISIPS

SEQ ID NO: 120010 - protein, 27 aa, Artificial Sequence
  Cyclic GFR-binding peptide
DDSSNVIEYQKYIVNSSDDIYLVSIPS

SEQ ID NO: 120011 - protein, 27 aa, Artificial Sequence
  Cyclic GFR-binding peptide
DDSSNVIYHYKLTPVGMDDKYLVSIPS

SEQ ID NO: 120012 - protein, 27 aa, Artificial Sequence
  Cyclic GFR-binding peptide
DDSSNVIYHYKLIVNNSSDKYLVSIPS

SEQ ID NO: 120013 - protein, 27 aa, Artificial Sequence
  Cyclic GFR-binding peptide
DDSSNVIEYKFKIVNSSDDLYLVSIPE

SEQ ID NO: 120014 - protein, 27 aa, Artificial Sequence
  Cyclic GFR-binding peptide
DDSSNVIYHYKLVKPTRGVKYLISIPS

SEQ ID NO: 120015 - protein, 27 aa, Artificial Sequence
  Cyclic GFR-binding peptide
DDSSNVIEYKFKVKPKRGVLYLISIPE

SEQ ID NO: 120016 - protein, 27 aa, Artificial Sequence
  Cyclic GFR-binding peptide
DDSSNVIEYQKYYTVVGKDIYLISIPS

SEQ ID NO: 120017 - protein, 27 aa, Artificial Sequence
  Cyclic GFR-binding peptide
DDSSNVIEYKFKVVKENEDLYLMSIPE

SEQ ID NO: 120018 - protein, 27 aa, Artificial Sequence
  Cyclic GFR-binding peptide
DDSSNVIEYQKYTPVGMDDIYLVSIPS

SEQ ID NO: 120019 - protein, 27 aa, Artificial Sequence
  Cyclic GFR-binding peptide
DDSSNVIEYQKYIVNNSSDIYLVSIPS

SEQ ID NO: 120020 - protein, 27 aa, Artificial Sequence
  Cyclic GFR-binding peptide
DDSSNVIEYKFKVVKDYEDLYLMSIPE

SEQ ID NO: 120021 - protein, 27 aa, Artificial Sequence
  Cyclic GFR-binding peptide
DDSSNVIEYKFKYTVVGKDLYLISIPE

SEQ ID NO: 120022 - protein, 27 aa, Artificial Sequence
  Cyclic GFR-binding peptide
DDSSNVIEYKFKVVNNAADLYLISIPE

SEQ ID NO: 120023 - protein, 27 aa, Artificial Sequence
  Cyclic GFR-binding peptide
SPISMLYIDENEKVVYKQYEDDSSNVI

SEQ ID NO: 120024 - protein, 27 aa, Artificial Sequence
  Cyclic GFR-binding peptide
NAISILYFIGKTPKILKKYRDDSSNVI

SEQ ID NO: 120025 - protein, 27 aa, Artificial Sequence
  Cyclic GFR-binding peptide
EPISILYLVGRTPKVKFKYEDDSSNVI

SEQ ID NO: 120026 - protein, 27 aa, Artificial Sequence
  Cyclic GFR-binding peptide
SPISMLYKDEYDKVVLKYHYDDSSNVI

SEQ ID NO: 120027 - protein, 27 aa, Artificial Sequence
  Cyclic GFR-binding peptide
EPISVLYLDDMGVPTKFKYEDDSSNVI

SEQ ID NO: 120028 - protein, 27 aa, Artificial Sequence
  Cyclic GFR-binding peptide
SPISILYIVGRKPKVYKQYEDDSSNVI

SEQ ID NO: 120029 - protein, 27 aa, Artificial Sequence
  Cyclic GFR-binding peptide
NAISMLYFDEYDKVVLKKYRDDSSNVI

SEQ ID NO: 120030 - protein, 27 aa, Artificial Sequence
  Cyclic GFR-binding peptide
SPISMLYIDEYDKVVYKQYEDDSSNVI

SEQ ID NO: 120031 - protein, 27 aa, Artificial Sequence
  Cyclic GFR-binding peptide
NAISILYFVGRTPKVLKKYRDDSSNVI

SEQ ID NO: 120032 - protein, 27 aa, Artificial Sequence
  Cyclic GFR-binding peptide
SPISILYKIGKTPKILKYHYDDSSNVI

SEQ ID NO: 120033 - protein, 27 aa, Artificial Sequence
  Cyclic GFR-binding peptide
SPISMLYKDENEKVVLKYHYDDSSNVI

SEQ ID NO: 120034 - protein, 27 aa, Artificial Sequence
  Cyclic GFR-binding peptide
SPISILYKVGRKPKVLKYHYDDSSNVI

SEQ ID NO: 120035 - protein, 27 aa, Artificial Sequence
  Cyclic GFR-binding peptide
EPISILYLIGKTPKIKFKYEDDSSNVI

SEQ ID NO: 120036 - protein, 27 aa, Artificial Sequence
  Cyclic GFR-binding peptide
SPISILYIIGKTPKIYKQYEDDSSNVI

SEQ ID NO: 120037 - protein, 27 aa, Artificial Sequence
  Cyclic GFR-binding peptide
NAISMLYFDENEKVVLKKYRDDSSNVI

SEQ ID NO: 120038 - protein, 27 aa, Artificial Sequence
  Cyclic GFR-binding peptide
NAISILYFDAANNVVLKKYRDDSSNVI

SEQ ID NO: 120039 - protein, 27 aa, Artificial Sequence
  Cyclic GFR-binding peptide
SPISILYKDKGVVTYLKYHYDDSSNVI

SEQ ID NO: 120040 - protein, 27 aa, Artificial Sequence
  Cyclic GFR-binding peptide
NAISVLYFDDMGVPTLKKYRDDSSNVI

SEQ ID NO: 120041 - protein, 27 aa, Artificial Sequence
  Cyclic GFR-binding peptide
NAISILYFVGRKPKVLKKYRDDSSNVI

SEQ ID NO: 120042 - protein, 27 aa, Artificial Sequence
  Cyclic GFR-binding peptide
SPISILYKDAANNVVLKYHYDDSSNVI

SEQ ID NO: 120043 - protein, 27 aa, Artificial Sequence
  Cyclic GFR-binding peptide
SPISVLYKDDSSNVILKYHYDDSSNVI

SEQ ID NO: 120044 - protein, 27 aa, Artificial Sequence
  Cyclic GFR-binding peptide
NAISVLYFDSSNNVILKKYRDDSSNVI

SEQ ID NO: 120045 - protein, 27 aa, Artificial Sequence
  Cyclic GFR-binding peptide
NAISILYFDKGVVTYLKKYRDDSSNVI

SEQ ID NO: 120046 - protein, 27 aa, Artificial Sequence
  Cyclic GFR-binding peptide
SPISILYIDAANNVVYKQYEDDSSNVI

SEQ ID NO: 120047 - protein, 27 aa, Artificial Sequence
  Cyclic GFR-binding peptide
NAISVLYFDDSSNVILKKYRDDSSNVI

SEQ ID NO: 120048 - protein, 27 aa, Artificial Sequence
  Cyclic GFR-binding peptide
EPISVLYLDSSNNVIKFKYEDDSSNVI

SEQ ID NO: 120049 - protein, 27 aa, Artificial Sequence
  Cyclic GFR-binding peptide
SPISILYIVGRTPKVYKQYEDDSSNVI

SEQ ID NO: 120050 - protein, 27 aa, Artificial Sequence
  Cyclic GFR-binding peptide
SPISVLYIDDSSNVIYKQYEDDSSNVI

SEQ ID NO: 120051 - protein, 27 aa, Artificial Sequence
  Cyclic GFR-binding peptide
SPISVLYKDDMGVPTLKYHYDDSSNVI

SEQ ID NO: 120052 - protein, 27 aa, Artificial Sequence
  Cyclic GFR-binding peptide
SPISVLYKDSSNNVILKYHYDDSSNVI

SEQ ID NO: 120053 - protein, 27 aa, Artificial Sequence
  Cyclic GFR-binding peptide
EPISVLYLDDSSNVIKFKYEDDSSNVI

SEQ ID NO: 120054 - protein, 27 aa, Artificial Sequence
  Cyclic GFR-binding peptide
SPISILYKVGRTPKVLKYHYDDSSNVI

SEQ ID NO: 120055 - protein, 27 aa, Artificial Sequence
  Cyclic GFR-binding peptide
EPISILYLVGRKPKVKFKYEDDSSNVI

SEQ ID NO: 120056 - protein, 27 aa, Artificial Sequence
  Cyclic GFR-binding peptide
SPISILYIDKGVVTYYKQYEDDSSNVI

SEQ ID NO: 120057 - protein, 27 aa, Artificial Sequence
  Cyclic GFR-binding peptide
EPISMLYLDENEKVVKFKYEDDSSNVI

SEQ ID NO: 120058 - protein, 27 aa, Artificial Sequence
  Cyclic GFR-binding peptide
SPISVLYIDDMGVPTYKQYEDDSSNVI

SEQ ID NO: 120059 - protein, 27 aa, Artificial Sequence
  Cyclic GFR-binding peptide
SPISVLYIDSSNNVIYKQYEDDSSNVI

SEQ ID NO: 120060 - protein, 27 aa, Artificial Sequence
  Cyclic GFR-binding peptide
EPISMLYLDEYDKVVKFKYEDDSSNVI

SEQ ID NO: 120061 - protein, 27 aa, Artificial Sequence
  Cyclic GFR-binding peptide
EPISILYLDKGVVTYKFKYEDDSSNVI

SEQ ID NO: 120062 - protein, 27 aa, Artificial Sequence
  Cyclic GFR-binding peptide
EPISILYLDAANNVVKFKYEDDSSNVI

SEQ ID NO: 120063 - protein, 27 aa, Artificial Sequence
  Cyclic GFR-binding peptide
DDSSNVIPIKGYIIQQKDNFYLMNIPS

SEQ ID NO: 120064 - protein, 27 aa, Artificial Sequence
  Cyclic GFR-binding peptide
DDSSNVIPIKGYVVKDYEDFYLMNIPS

SEQ ID NO: 120065 - protein, 27 aa, Artificial Sequence
  Cyclic GFR-binding peptide
DDSSNVIPIKGYIVNSSDDFYLVNIPS

SEQ ID NO: 120066 - protein, 27 aa, Artificial Sequence
  Cyclic GFR-binding peptide
DDSSNVIPIKGYLLVRGNDFYLMNIPS

SEQ ID NO: 120067 - protein, 27 aa, Artificial Sequence
  Cyclic GFR-binding peptide
DDSSNVIPIKGYVVNNAADFYLINIPS

SEQ ID NO: 120068 - protein, 27 aa, Artificial Sequence
  Cyclic GFR-binding peptide
DDSSNVIPIKGYVVKENEDFYLMNIPS

SEQ ID NO: 120069 - protein, 27 aa, Artificial Sequence
  Cyclic GFR-binding peptide
DDSSNVIPIKGYVVNNASDFYLINIPS

SEQ ID NO: 120070 - protein, 27 aa, Artificial Sequence
  Cyclic GFR-binding peptide
DDSSNVIPIKGYYTVVGKDFYLINIPS

SEQ ID NO: 120071 - protein, 27 aa, Artificial Sequence
  Cyclic GFR-binding peptide
DDSSNVIPIKGYTPVGMDDFYLVNIPS

SEQ ID NO: 120072 - protein, 27 aa, Artificial Sequence
  Cyclic GFR-binding peptide
DDSSNVIPIKGYIVNNSSDFYLVNIPS

SEQ ID NO: 120073 - protein, 27 aa, Artificial Sequence
  Cyclic GFR-binding peptide
SPINMLYFNDKQQIIYGKIPDDSSNVI

SEQ ID NO: 120074 - protein, 27 aa, Artificial Sequence
  Cyclic GFR-binding peptide
SPINMLYFDEYDKVVYGKIPDDSSNVI

SEQ ID NO: 120075 - protein, 27 aa, Artificial Sequence
  Cyclic GFR-binding peptide
SPINVLYFDDSSNVIYGKIPDDSSNVI

SEQ ID NO: 120076 - protein, 27 aa, Artificial Sequence
  Cyclic GFR-binding peptide
SPINMLYFDNGRVLLYGKIPDDSSNVI

SEQ ID NO: 120077 - protein, 27 aa, Artificial Sequence
  Cyclic GFR-binding peptide
SPINILYFDAANNVVYGKIPDDSSNVI

SEQ ID NO: 120078 - protein, 27 aa, Artificial Sequence
  Cyclic GFR-binding peptide
SPINMLYFDENEKVVYGKIPDDSSNVI

SEQ ID NO: 120079 - protein, 27 aa, Artificial Sequence
  Cyclic GFR-binding peptide
SPINILYFDSANNVVYGKIPDDSSNVI

SEQ ID NO: 120080 - protein, 27 aa, Artificial Sequence
  Cyclic GFR-binding peptide
SPINILYFDKGVVTYYGKIPDDSSNVI

SEQ ID NO: 120081 - protein, 27 aa, Artificial Sequence
  Cyclic GFR-binding peptide
SPINVLYFDDMGVPTYGKIPDDSSNVI

SEQ ID NO: 120082 - protein, 27 aa, Artificial Sequence
  Cyclic GFR-binding peptide
SPINVLYFDSSNNVIYGKIPDDSSNVI

SEQ ID NO: 120083 - protein, 27 aa, Artificial Sequence
  Cyclic GFR-binding peptide
DDSSNVIPIKGYIIQQKDNFYLMNIPS

SEQ ID NO: 120084 - protein, 27 aa, Artificial Sequence
  Cyclic GFR-binding peptide
DDSSNVIPIKGYVVKDYEDFYLMNIPS

SEQ ID NO: 120085 - protein, 27 aa, Artificial Sequence
  Cyclic GFR-binding peptide
DDSSNVIPIKGYIVNSSDDFYLVNIPS

SEQ ID NO: 120086 - protein, 27 aa, Artificial Sequence
  Cyclic GFR-binding peptide
DDSSNVIPIKGYLLVRGNDFYLMNIPS

SEQ ID NO: 120087 - protein, 27 aa, Artificial Sequence
  Cyclic GFR-binding peptide
DDSSNVIPIKGYVVNNAADFYLINIPS

SEQ ID NO: 120088 - protein, 27 aa, Artificial Sequence
  Cyclic GFR-binding peptide
DDSSNVIPIKGYVVKENEDFYLMNIPS

SEQ ID NO: 120089 - protein, 27 aa, Artificial Sequence
  Cyclic GFR-binding peptide
DDSSNVIPIKGYVVNNASDFYLINIPS

SEQ ID NO: 120090 - protein, 27 aa, Artificial Sequence
  Cyclic GFR-binding peptide
DDSSNVIPIKGYYTVVGKDFYLINIPS

SEQ ID NO: 120091 - protein, 27 aa, Artificial Sequence
  Cyclic GFR-binding peptide
DDSSNVIPIKGYTPVGMDDFYLVNIPS

SEQ ID NO: 120092 - protein, 27 aa, Artificial Sequence
  Cyclic GFR-binding peptide
DDSSNVIPIKGYIVNNSSDFYLVNIPS

SEQ ID NO: 120093 - protein, 27 aa, Artificial Sequence
  Cyclic GFR-binding peptide
SPINMLYFNDKQQIIYGKIPDDSSNVI

SEQ ID NO: 120094 - protein, 27 aa, Artificial Sequence
  Cyclic GFR-binding peptide
SPINMLYFDEYDKVVYGKIPDDSSNVI

SEQ ID NO: 120095 - protein, 27 aa, Artificial Sequence
  Cyclic GFR-binding peptide
SPINVLYFDDSSNVIYGKIPDDSSNVI

SEQ ID NO: 120096 - protein, 27 aa, Artificial Sequence
  Cyclic GFR-binding peptide
SPINMLYFDNGRVLLYGKIPDDSSNVI

SEQ ID NO: 120097 - protein, 27 aa, Artificial Sequence
  Cyclic GFR-binding peptide
SPINILYFDAANNVVYGKIPDDSSNVI

SEQ ID NO: 120098 - protein, 27 aa, Artificial Sequence
  Cyclic GFR-binding peptide
SPINMLYFDENEKVVYGKIPDDSSNVI

SEQ ID NO: 120099 - protein, 27 aa, Artificial Sequence
  Cyclic GFR-binding peptide
SPINILYFDSANNVVYGKIPDDSSNVI

SEQ ID NO: 120100 - protein, 27 aa, Artificial Sequence
  Cyclic GFR-binding peptide
SPINILYFDKGVVTYYGKIPDDSSNVI

SEQ ID NO: 120101 - protein, 27 aa, Artificial Sequence
  Cyclic GFR-binding peptide
SPINVLYFDDMGVPTYGKIPDDSSNVI

SEQ ID NO: 120102 - protein, 27 aa, Artificial Sequence
  Cyclic GFR-binding peptide
SPINVLYFDSSNNVIYGKIPDDSSNVI

SEQ ID NO: 120103 - protein, 27 aa, Artificial Sequence
  Cyclic GFR-binding peptide
DDSSNVIRYKKLIKPTKGIFYLISIAN

SEQ ID NO: 120104 - protein, 27 aa, Artificial Sequence
  Cyclic GFR-binding peptide
DDSSNVIRYKKLVVKDYEDFYLMSIAN

SEQ ID NO: 120105 - protein, 27 aa, Artificial Sequence
  Cyclic GFR-binding peptide
DDSSNVIRYKKLVKPTRGVFYLISIAN

SEQ ID NO: 120106 - protein, 27 aa, Artificial Sequence
  Cyclic GFR-binding peptide
DDSSNVIRYKKLVVKENEDFYLMSIAN

SEQ ID NO: 120107 - protein, 27 aa, Artificial Sequence
  Cyclic GFR-binding peptide
DDSSNVIRYKKLVKPKRGVFYLISIAN

SEQ ID NO: 120108 - protein, 27 aa, Artificial Sequence
  Cyclic GFR-binding peptide
DDSSNVIRYKKLIVNSSDDFYLVSIAN

SEQ ID NO: 120109 - protein, 27 aa, Artificial Sequence
  Cyclic GFR-binding peptide
DDSSNVIRYKKLVVNNASDFYLISIAN

SEQ ID NO: 120110 - protein, 27 aa, Artificial Sequence
  Cyclic GFR-binding peptide
NAISILYFIGKTPKILKKYRDDSSNVI

SEQ ID NO: 120111 - protein, 27 aa, Artificial Sequence
  Cyclic GFR-binding peptide
NAISMLYFDEYDKVVLKKYRDDSSNVI

SEQ ID NO: 120112 - protein, 27 aa, Artificial Sequence
  Cyclic GFR-binding peptide
NAISILYFVGRTPKVLKKYRDDSSNVI

SEQ ID NO: 120113 - protein, 27 aa, Artificial Sequence
  Cyclic GFR-binding peptide
NAISMLYFDENEKVVLKKYRDDSSNVI

SEQ ID NO: 120114 - protein, 27 aa, Artificial Sequence
  Cyclic GFR-binding peptide
NAISILYFVGRKPKVLKKYRDDSSNVI

SEQ ID NO: 120115 - protein, 27 aa, Artificial Sequence
  Cyclic GFR-binding peptide
NAISVLYFDDSSNVILKKYRDDSSNVI

SEQ ID NO: 120116 - protein, 27 aa, Artificial Sequence
  Cyclic GFR-binding peptide
NAISILYFDSANNVVLKKYRDDSSNVI

SEQ ID NO: 120117 - protein, 27 aa, Artificial Sequence
  Cyclic GFR-binding peptide
DDSSNVIEYQKYVVKENEDIYLMSIPS

SEQ ID NO: 120118 - protein, 27 aa, Artificial Sequence
  Cyclic GFR-binding peptide
DDSSNVINSLQEVVKDYEDYYLMTLPE

SEQ ID NO: 120119 - protein, 27 aa, Artificial Sequence
  Cyclic GFR-binding peptide
DDSSNVIEYQKYVVKENEDIFLMSIPS

SEQ ID NO: 120120 - protein, 27 aa, Artificial Sequence
  Cyclic GFR-binding peptide
DDSSNVINSLQEIKPTKGIYYVIPLPE

SEQ ID NO: 120121 - protein, 27 aa, Artificial Sequence
  Cyclic GFR-binding peptide
DDSSNVINSLQEVKPKRGVYYLITLPE

SEQ ID NO: 120122 - protein, 27 aa, Artificial Sequence
  Cyclic GFR-binding peptide
DDSSNVIEYQKYVVNNAADIYLISIPS

SEQ ID NO: 120123 - protein, 27 aa, Artificial Sequence
  Cyclic GFR-binding peptide
DDSSNVINSLQEVKPTRGVYYVIPLPE

SEQ ID NO: 120124 - protein, 27 aa, Artificial Sequence
  Cyclic GFR-binding peptide
DDSSNVIEYQKYIVNSSDDIFLVSIPS

SEQ ID NO: 120125 - protein, 27 aa, Artificial Sequence
  Cyclic GFR-binding peptide
DDSSNVIEYQKYVKPTRGVIFLISIPS

SEQ ID NO: 120126 - protein, 27 aa, Artificial Sequence
  Cyclic GFR-binding peptide
DDSSNVIEYQKYVVKDYEDIYLMSIPS

SEQ ID NO: 120127 - protein, 27 aa, Artificial Sequence
  Cyclic GFR-binding peptide
DDSSNVINSLQEVVKENEDYYLMTLPE

SEQ ID NO: 120128 - protein, 27 aa, Artificial Sequence
  Cyclic GFR-binding peptide
DDSSNVINSLQEVVNNASDYYLITLPE

SEQ ID NO: 120129 - protein, 27 aa, Artificial Sequence
  Cyclic GFR-binding peptide
DDSSNVINSLQEVKPKRGVYYVIPLPE

SEQ ID NO: 120130 - protein, 27 aa, Artificial Sequence
  Cyclic GFR-binding peptide
DDSSNVIEYQKYIVNSSDDIYLVSIPS

SEQ ID NO: 120131 - protein, 27 aa, Artificial Sequence
  Cyclic GFR-binding peptide
DDSSNVINSLQEVVKENEDYYVMPLPE

SEQ ID NO: 120132 - protein, 27 aa, Artificial Sequence
  Cyclic GFR-binding peptide
DDSSNVIEYQKYVVKDYEDIFLMSIPS

SEQ ID NO: 120133 - protein, 27 aa, Artificial Sequence
  Cyclic GFR-binding peptide
DDSSNVINSLQEVVNNASDYYVIPLPE

SEQ ID NO: 120134 - protein, 27 aa, Artificial Sequence
  Cyclic GFR-binding peptide
DDSSNVIEYQKYVVNNASDIYLISIPS

SEQ ID NO: 120135 - protein, 27 aa, Artificial Sequence
  Cyclic GFR-binding peptide
DDSSNVINSLQEVKPTRGVYYLITLPE

SEQ ID NO: 120136 - protein, 27 aa, Artificial Sequence
  Cyclic GFR-binding peptide
DDSSNVIEYQKYYTVVGKDIYLISIPS

SEQ ID NO: 120137 - protein, 27 aa, Artificial Sequence
  Cyclic GFR-binding peptide
DDSSNVIEYQKYIIQQKDNIYLMSIPS

SEQ ID NO: 120138 - protein, 27 aa, Artificial Sequence
  Cyclic GFR-binding peptide
DDSSNVIEYQKYTPVGMDDIYLVSIPS

SEQ ID NO: 120139 - protein, 27 aa, Artificial Sequence
  Cyclic GFR-binding peptide
DDSSNVIEYQKYIKPTKGIIFLISIPS

SEQ ID NO: 120140 - protein, 27 aa, Artificial Sequence
  Cyclic GFR-binding peptide
DDSSNVIEYQKYIVNNSSDIYLVSIPS

SEQ ID NO: 120141 - protein, 27 aa, Artificial Sequence
  Cyclic GFR-binding peptide
DDSSNVINSLQEIKPTKGIYYLITLPE

SEQ ID NO: 120142 - protein, 27 aa, Artificial Sequence
  Cyclic GFR-binding peptide
DDSSNVIEYQKYVVNNASDIFLISIPS

SEQ ID NO: 120143 - protein, 27 aa, Artificial Sequence
  Cyclic GFR-binding peptide
DDSSNVIEYQKYVKPKRGVIFLISIPS

SEQ ID NO: 120144 - protein, 27 aa, Artificial Sequence
  Cyclic GFR-binding peptide
DDSSNVINSLQEIVNSSDDYYVVPLPE

SEQ ID NO: 120145 - protein, 27 aa, Artificial Sequence
  Cyclic GFR-binding peptide
DDSSNVINSLQEVVKDYEDYYVMPLPE

SEQ ID NO: 120146 - protein, 27 aa, Artificial Sequence
  Cyclic GFR-binding peptide
DDSSNVIEYQKYLLVRGNDIYLMSIPS

SEQ ID NO: 120147 - protein, 27 aa, Artificial Sequence
  Cyclic GFR-binding peptide
DDSSNVINSLQEIVNSSDDYYLVTLPE

SEQ ID NO: 120148 - protein, 27 aa, Artificial Sequence
  Cyclic GFR-binding peptide
SPISMLYIDENEKVVYKQYEDDSSNVI

SEQ ID NO: 120149 - protein, 27 aa, Artificial Sequence
  Cyclic GFR-binding peptide
EPLTMLYYDEYDKVVEQLSNDDSSNVI

SEQ ID NO: 120150 - protein, 27 aa, Artificial Sequence
  Cyclic GFR-binding peptide
SPISMLFIDENEKVVYKQYEDDSSNVI

SEQ ID NO: 120151 - protein, 27 aa, Artificial Sequence
  Cyclic GFR-binding peptide
EPLPIVYYIGKTPKIEQLSNDDSSNVI

SEQ ID NO: 120152 - protein, 27 aa, Artificial Sequence
  Cyclic GFR-binding peptide
EPLTILYYVGRKPKVEQLSNDDSSNVI

SEQ ID NO: 120153 - protein, 27 aa, Artificial Sequence
  Cyclic GFR-binding peptide
SPISILYIDAANNVVYKQYEDDSSNVI

SEQ ID NO: 120154 - protein, 27 aa, Artificial Sequence
  Cyclic GFR-binding peptide
EPLPIVYYVGRTPKVEQLSNDDSSNVI

SEQ ID NO: 120155 - protein, 27 aa, Artificial Sequence
  Cyclic GFR-binding peptide
SPISVLFIDDSSNVIYKQYEDDSSNVI

SEQ ID NO: 120156 - protein, 27 aa, Artificial Sequence
  Cyclic GFR-binding peptide
SPISILFIVGRTPKVYKQYEDDSSNVI

SEQ ID NO: 120157 - protein, 27 aa, Artificial Sequence
  Cyclic GFR-binding peptide
SPISMLYIDEYDKVVYKQYEDDSSNVI

SEQ ID NO: 120158 - protein, 27 aa, Artificial Sequence
  Cyclic GFR-binding peptide
EPLTMLYYDENEKVVEQLSNDDSSNVI

SEQ ID NO: 120159 - protein, 27 aa, Artificial Sequence
  Cyclic GFR-binding peptide
EPLTILYYDSANNVVEQLSNDDSSNVI

SEQ ID NO: 120160 - protein, 27 aa, Artificial Sequence
  Cyclic GFR-binding peptide
EPLPIVYYVGRKPKVEQLSNDDSSNVI

SEQ ID NO: 120161 - protein, 27 aa, Artificial Sequence
  Cyclic GFR-binding peptide
SPISVLYIDDSSNVIYKQYEDDSSNVI

SEQ ID NO: 120162 - protein, 27 aa, Artificial Sequence
  Cyclic GFR-binding peptide
EPLPMVYYDENEKVVEQLSNDDSSNVI

SEQ ID NO: 120163 - protein, 27 aa, Artificial Sequence
  Cyclic GFR-binding peptide
SPISMLFIDEYDKVVYKQYEDDSSNVI

SEQ ID NO: 120164 - protein, 27 aa, Artificial Sequence
  Cyclic GFR-binding peptide
EPLPIVYYDSANNVVEQLSNDDSSNVI

SEQ ID NO: 120165 - protein, 27 aa, Artificial Sequence
  Cyclic GFR-binding peptide
SPISILYIDSANNVVYKQYEDDSSNVI

SEQ ID NO: 120166 - protein, 27 aa, Artificial Sequence
  Cyclic GFR-binding peptide
EPLTILYYVGRTPKVEQLSNDDSSNVI

SEQ ID NO: 120167 - protein, 27 aa, Artificial Sequence
  Cyclic GFR-binding peptide
SPISILYIDKGVVTYYKQYEDDSSNVI

SEQ ID NO: 120168 - protein, 27 aa, Artificial Sequence
  Cyclic GFR-binding peptide
SPISMLYINDKQQIIYKQYEDDSSNVI

SEQ ID NO: 120169 - protein, 27 aa, Artificial Sequence
  Cyclic GFR-binding peptide
SPISVLYIDDMGVPTYKQYEDDSSNVI

SEQ ID NO: 120170 - protein, 27 aa, Artificial Sequence
  Cyclic GFR-binding peptide
SPISILFIIGKTPKIYKQYEDDSSNVI

SEQ ID NO: 120171 - protein, 27 aa, Artificial Sequence
  Cyclic GFR-binding peptide
SPISVLYIDSSNNVIYKQYEDDSSNVI

SEQ ID NO: 120172 - protein, 27 aa, Artificial Sequence
  Cyclic GFR-binding peptide
EPLTILYYIGKTPKIEQLSNDDSSNVI

SEQ ID NO: 120173 - protein, 27 aa, Artificial Sequence
  Cyclic GFR-binding peptide
SPISILFIDSANNVVYKQYEDDSSNVI

SEQ ID NO: 120174 - protein, 27 aa, Artificial Sequence
  Cyclic GFR-binding peptide
SPISILFIVGRKPKVYKQYEDDSSNVI

SEQ ID NO: 120175 - protein, 27 aa, Artificial Sequence
  Cyclic GFR-binding peptide
EPLPVVYYDDSSNVIEQLSNDDSSNVI

SEQ ID NO: 120176 - protein, 27 aa, Artificial Sequence
  Cyclic GFR-binding peptide
EPLPMVYYDEYDKVVEQLSNDDSSNVI

SEQ ID NO: 120177 - protein, 27 aa, Artificial Sequence
  Cyclic GFR-binding peptide
SPISMLYIDNGRVLLYKQYEDDSSNVI

SEQ ID NO: 120178 - protein, 27 aa, Artificial Sequence
  Cyclic GFR-binding peptide
EPLTVLYYDDSSNVIEQLSNDDSSNVI

SEQ ID NO: 120179 - protein, 27 aa, Artificial Sequence
  Cyclic GFR-binding peptide
DDSSNVIPYVKLVVKENEDFFLMSLSS

SEQ ID NO: 120180 - protein, 29 aa, Artificial Sequence
  Cyclic GFR-binding peptide
DDSSNVIPYVKLHQGQHPKIRFFLMSLSS

SEQ ID NO: 120181 - protein, 27 aa, Artificial Sequence
  Cyclic GFR-binding peptide
DDSSNVIPYVKLVVNKNEDFFLISLSS

SEQ ID NO: 120182 - protein, 27 aa, Artificial Sequence
  Cyclic GFR-binding peptide
DDSSNVIPYVKLVKPKRGVLFFISLSS

SEQ ID NO: 120183 - protein, 27 aa, Artificial Sequence
  Cyclic GFR-binding peptide
DDSSNVIPYVKLVVNNAADFFLISLSS

SEQ ID NO: 120184 - protein, 27 aa, Artificial Sequence
  Cyclic GFR-binding peptide
DDSSNVIPYVKLIVNNSSDFFLVSLSS

SEQ ID NO: 120185 - protein, 27 aa, Artificial Sequence
  Cyclic GFR-binding peptide
DDSSNVIPYVKLIIQQKDNFFLMSLSS

SEQ ID NO: 120186 - protein, 27 aa, Artificial Sequence
  Cyclic GFR-binding peptide
DDSSNVIPYVKLLLVRGNDFFLMSLSS

SEQ ID NO: 120187 - protein, 27 aa, Artificial Sequence
  Cyclic GFR-binding peptide
DDSSNVIPYVKLVKPTRGVLFFISLSS

SEQ ID NO: 120188 - protein, 27 aa, Artificial Sequence
  Cyclic GFR-binding peptide
DDSSNVIPYVKLVVNNASDFFLISLSS

SEQ ID NO: 120189 - protein, 27 aa, Artificial Sequence
  Cyclic GFR-binding peptide
DDSSNVIPYVKLIKPTKGILFFISLSS

SEQ ID NO: 120190 - protein, 27 aa, Artificial Sequence
  Cyclic GFR-binding peptide
DDSSNVIPYVKLTPVGMDDFFLVSLSS

SEQ ID NO: 120191 - protein, 27 aa, Artificial Sequence
  Cyclic GFR-binding peptide
DDSSNVIPYVKLYTVVGKDFFLISLSS

SEQ ID NO: 120192 - protein, 27 aa, Artificial Sequence
  Cyclic GFR-binding peptide
DDSSNVIPYVKLVVKDYEDFFLMSLSS

SEQ ID NO: 120193 - protein, 27 aa, Artificial Sequence
  Cyclic GFR-binding peptide
DDSSNVIPYVKLIVNSSDDFFLVSLSS

SEQ ID NO: 120194 - protein, 29 aa, Artificial Sequence
  Cyclic GFR-binding peptide
DDSSNVIPYVKLLKPKKRVYEFFLVSLSS

SEQ ID NO: 120195 - protein, 27 aa, Artificial Sequence
  Cyclic GFR-binding peptide
SSLSMLFFDENEKVVLKVYPDDSSNVI

SEQ ID NO: 120196 - protein, 29 aa, Artificial Sequence
  Cyclic GFR-binding peptide
SSLSMLFFRIKPHQGQHLKVYPDDSSNVI

SEQ ID NO: 120197 - protein, 27 aa, Artificial Sequence
  Cyclic GFR-binding peptide
SSLSILFFDENKNVVLKVYPDDSSNVI

SEQ ID NO: 120198 - protein, 27 aa, Artificial Sequence
  Cyclic GFR-binding peptide
SSLSILFFVGRKPKVLKVYPDDSSNVI

SEQ ID NO: 120199 - protein, 27 aa, Artificial Sequence
  Cyclic GFR-binding peptide
SSLSILFFDAANNVVLKVYPDDSSNVI

SEQ ID NO: 120200 - protein, 27 aa, Artificial Sequence
  Cyclic GFR-binding peptide
SSLSVLFFDSSNNVILKVYPDDSSNVI

SEQ ID NO: 120201 - protein, 27 aa, Artificial Sequence
  Cyclic GFR-binding peptide
SSLSMLFFNDKQQIILKVYPDDSSNVI

SEQ ID NO: 120202 - protein, 27 aa, Artificial Sequence
  Cyclic GFR-binding peptide
SSLSMLFFDNGRVLLLKVYPDDSSNVI

SEQ ID NO: 120203 - protein, 27 aa, Artificial Sequence
  Cyclic GFR-binding peptide
SSLSILFFVGRTPKVLKVYPDDSSNVI

SEQ ID NO: 120204 - protein, 27 aa, Artificial Sequence
  Cyclic GFR-binding peptide
SSLSILFFDSANNVVLKVYPDDSSNVI

SEQ ID NO: 120205 - protein, 27 aa, Artificial Sequence
  Cyclic GFR-binding peptide
SSLSILFFIGKTPKILKVYPDDSSNVI

SEQ ID NO: 120206 - protein, 27 aa, Artificial Sequence
  Cyclic GFR-binding peptide
SSLSVLFFDDMGVPTLKVYPDDSSNVI

SEQ ID NO: 120207 - protein, 27 aa, Artificial Sequence
  Cyclic GFR-binding peptide
SSLSILFFDKGVVTYLKVYPDDSSNVI

SEQ ID NO: 120208 - protein, 27 aa, Artificial Sequence
  Cyclic GFR-binding peptide
SSLSMLFFDEYDKVVLKVYPDDSSNVI

SEQ ID NO: 120209 - protein, 27 aa, Artificial Sequence
  Cyclic GFR-binding peptide
SSLSVLFFDDSSNVILKVYPDDSSNVI

SEQ ID NO: 120210 - protein, 29 aa, Artificial Sequence
  Cyclic GFR-binding peptide
SSLSVLFFEYVRKKPKLLKVYPDDSSNVI

SEQ ID NO: 120211 - protein, 27 aa, Artificial Sequence
  Cyclic GFR-binding peptide
DDSSNVINSLQEVVKDYEDYYLMTLPE

SEQ ID NO: 120212 - protein, 27 aa, Artificial Sequence
  Cyclic GFR-binding peptide
DDSSNVINSLQEIKPTKGIYYVIPLPE

SEQ ID NO: 120213 - protein, 27 aa, Artificial Sequence
  Cyclic GFR-binding peptide
DDSSNVISMEGIIVNSSDDMIQVTINS

SEQ ID NO: 120214 - protein, 27 aa, Artificial Sequence
  Cyclic GFR-binding peptide
DDSSNVINSLQEVKPKRGVYYLITLPE

SEQ ID NO: 120215 - protein, 27 aa, Artificial Sequence
  Cyclic GFR-binding peptide
DDSSNVINSLQEVKPTRGVYYVIPLPE

SEQ ID NO: 120216 - protein, 27 aa, Artificial Sequence
  Cyclic GFR-binding peptide
DDSSNVIVTAKKVVKENEDIKRMQVPR

SEQ ID NO: 120217 - protein, 27 aa, Artificial Sequence
  Cyclic GFR-binding peptide
DDSSNVINSLQEIVNSSDDYYVVPLPE

SEQ ID NO: 120218 - protein, 29 aa, Artificial Sequence
  Cyclic GFR-binding peptide
DDSSNVISMEGIHQGQHPKIRMIQMTINS

SEQ ID NO: 120219 - protein, 29 aa, Artificial Sequence
  Cyclic GFR-binding peptide
DDSSNVIVTAKKLKPKKRVYEIKRVQVPR

SEQ ID NO: 120220 - protein, 27 aa, Artificial Sequence
  Cyclic GFR-binding peptide
DDSSNVISMEGIVVKDYEDMIQMTINS

SEQ ID NO: 120221 - protein, 29 aa, Artificial Sequence
  Cyclic GFR-binding peptide
DDSSNVIVQVEKHQGQHPKIRVKAMKVSR

SEQ ID NO: 120222 - protein, 27 aa, Artificial Sequence
  Cyclic GFR-binding peptide
DDSSNVIVTAKKIKPTKGIIKRIQVPR

SEQ ID NO: 120223 - protein, 27 aa, Artificial Sequence
  Cyclic GFR-binding peptide
DDSSNVISMEGIVKPTRGVMIQITINS

SEQ ID NO: 120224 - protein, 29 aa, Artificial Sequence
  Cyclic GFR-binding peptide
DDSSNVINSLQEFIPKKRVIEYYVVPLPE

SEQ ID NO: 120225 - protein, 27 aa, Artificial Sequence
  Cyclic GFR-binding peptide
DDSSNVIVQVEKVKPKRGVVKAIKVSR

SEQ ID NO: 120226 - protein, 27 aa, Artificial Sequence
  Cyclic GFR-binding peptide
DDSSNVIVQVEKVVKENEDVKAMKVSR

SEQ ID NO: 120227 - protein, 27 aa, Artificial Sequence
  Cyclic GFR-binding peptide
DDSSNVINSLQEVVKENEDYYVMPLPE

SEQ ID NO: 120228 - protein, 27 aa, Artificial Sequence
  Cyclic GFR-binding peptide
DDSSNVIVTAKKIVNSSDDIKRVQVPR

SEQ ID NO: 120229 - protein, 27 aa, Artificial Sequence
  Cyclic GFR-binding peptide
DDSSNVIVQVEKIKPTKGIVKAIKVSR

SEQ ID NO: 120230 - protein, 27 aa, Artificial Sequence
  Cyclic GFR-binding peptide
DDSSNVINSLQEIKPTKGIYYLITLPE

SEQ ID NO: 120231 - protein, 29 aa, Artificial Sequence
  Cyclic GFR-binding peptide
DDSSNVINSLQEFIPKKRVIEYYLVTLPE

SEQ ID NO: 120232 - protein, 27 aa, Artificial Sequence
  Cyclic GFR-binding peptide
DDSSNVIVQVEKIVNSSDDVKAVKVSR

SEQ ID NO: 120233 - protein, 27 aa, Artificial Sequence
  Cyclic GFR-binding peptide
DDSSNVINSLQEIVNSSDDYYLVTLPE

SEQ ID NO: 120234 - protein, 29 aa, Artificial Sequence
  Cyclic GFR-binding peptide
DDSSNVIVQVEKLKPKKRVYEVKAVKVSR

SEQ ID NO: 120235 - protein, 29 aa, Artificial Sequence
  Cyclic GFR-binding peptide
DDSSNVIVQVEKFIPKKRVIEVKAVKVSR

SEQ ID NO: 120236 - protein, 29 aa, Artificial Sequence
  Cyclic GFR-binding peptide
DDSSNVIVTAKKHQGQHPKIRIKRMQVPR

SEQ ID NO: 120237 - protein, 27 aa, Artificial Sequence
  Cyclic GFR-binding peptide
DDSSNVINSLQEVVKENEDYYLMTLPE

SEQ ID NO: 120238 - protein, 29 aa, Artificial Sequence
  Cyclic GFR-binding peptide
DDSSNVISMEGIFIPKKRVIEMIQVTINS

SEQ ID NO: 120239 - protein, 27 aa, Artificial Sequence
  Cyclic GFR-binding peptide
DDSSNVINSLQEVKPKRGVYYVIPLPE

SEQ ID NO: 120240 - protein, 27 aa, Artificial Sequence
  Cyclic GFR-binding peptide
DDSSNVIVTAKKVKPKRGVIKRIQVPR

SEQ ID NO: 120241 - protein, 27 aa, Artificial Sequence
  Cyclic GFR-binding peptide
DDSSNVINSLQEVKPTRGVYYLITLPE

SEQ ID NO: 120242 - protein, 27 aa, Artificial Sequence
  Cyclic GFR-binding peptide
DDSSNVIVQVEKVKPTRGVVKAIKVSR

SEQ ID NO: 120243 - protein, 29 aa, Artificial Sequence
  Cyclic GFR-binding peptide
DDSSNVISMEGILKPKKRVYEMIQVTINS

SEQ ID NO: 120244 - protein, 27 aa, Artificial Sequence
  Cyclic GFR-binding peptide
DDSSNVINSLQEVVKDYEDYYVMPLPE

SEQ ID NO: 120245 - protein, 27 aa, Artificial Sequence
  Cyclic GFR-binding peptide
DDSSNVIVTAKKVKPTRGVIKRIQVPR

SEQ ID NO: 120246 - protein, 29 aa, Artificial Sequence
  Cyclic GFR-binding peptide
DDSSNVINSLQELKPKKRVYEYYLVTLPE

SEQ ID NO: 120247 - protein, 27 aa, Artificial Sequence
  Cyclic GFR-binding peptide
DDSSNVISMEGIVKPKRGVMIQITINS

SEQ ID NO: 120248 - protein, 27 aa, Artificial Sequence
  Cyclic GFR-binding peptide
DDSSNVISMEGIVVKENEDMIQMTINS

SEQ ID NO: 120249 - protein, 27 aa, Artificial Sequence
  Cyclic GFR-binding peptide
DDSSNVISMEGIIKPTKGIMIQITINS

SEQ ID NO: 120250 - protein, 29 aa, Artificial Sequence
  Cyclic GFR-binding peptide
DDSSNVINSLQEHQGQHPKIRYYLMTLPE

SEQ ID NO: 120251 - protein, 27 aa, Artificial Sequence
  Cyclic GFR-binding peptide
DDSSNVIVTAKKVVKDYEDIKRMQVPR

SEQ ID NO: 120252 - protein, 29 aa, Artificial Sequence
  Cyclic GFR-binding peptide
DDSSNVINSLQEHQGQHPKIRYYVMPLPE

SEQ ID NO: 120253 - protein, 29 aa, Artificial Sequence
  Cyclic GFR-binding peptide
DDSSNVINSLQELKPKKRVYEYYVVPLPE

SEQ ID NO: 120254 - protein, 29 aa, Artificial Sequence
  Cyclic GFR-binding peptide
DDSSNVIVTAKKFIPKKRVIEIKRVQVPR

SEQ ID NO: 120255 - protein, 27 aa, Artificial Sequence
  Cyclic GFR-binding peptide
DDSSNVIVQVEKVVKDYEDVKAMKVSR

SEQ ID NO: 120256 - protein, 27 aa, Artificial Sequence
  Cyclic GFR-binding peptide
EPLTMLYYDEYDKVVEQLSNDDSSNVI

SEQ ID NO: 120257 - protein, 27 aa, Artificial Sequence
  Cyclic GFR-binding peptide
EPLPIVYYIGKTPKIEQLSNDDSSNVI

SEQ ID NO: 120258 - protein, 27 aa, Artificial Sequence
  Cyclic GFR-binding peptide
SNITVQIMDDSSNVIIGEMSDDSSNVI

SEQ ID NO: 120259 - protein, 27 aa, Artificial Sequence
  Cyclic GFR-binding peptide
EPLTILYYVGRKPKVEQLSNDDSSNVI

SEQ ID NO: 120260 - protein, 27 aa, Artificial Sequence
  Cyclic GFR-binding peptide
EPLPIVYYVGRTPKVEQLSNDDSSNVI

SEQ ID NO: 120261 - protein, 27 aa, Artificial Sequence
  Cyclic GFR-binding peptide
RPVQMRKIDENEKVVKKATVDDSSNVI

SEQ ID NO: 120262 - protein, 27 aa, Artificial Sequence
  Cyclic GFR-binding peptide
EPLPVVYYDDSSNVIEQLSNDDSSNVI

SEQ ID NO: 120263 - protein, 29 aa, Artificial Sequence
  Cyclic GFR-binding peptide
SNITMQIMRIKPHQGQHIGEMSDDSSNVI

SEQ ID NO: 120264 - protein, 29 aa, Artificial Sequence
  Cyclic GFR-binding peptide
RPVQVRKIEYVRKKPKLKKATVDDSSNVI

SEQ ID NO: 120265 - protein, 27 aa, Artificial Sequence
  Cyclic GFR-binding peptide
SNITMQIMDEYDKVVIGEMSDDSSNVI

SEQ ID NO: 120266 - protein, 29 aa, Artificial Sequence
  Cyclic GFR-binding peptide
RSVKMAKVRIKPHQGQHKEVQVDDSSNVI

SEQ ID NO: 120267 - protein, 27 aa, Artificial Sequence
  Cyclic GFR-binding peptide
RPVQIRKIIGKTPKIKKATVDDSSNVI

SEQ ID NO: 120268 - protein, 27 aa, Artificial Sequence
  Cyclic GFR-binding peptide
SNITIQIMVGRTPKVIGEMSDDSSNVI

SEQ ID NO: 120269 - protein, 29 aa, Artificial Sequence
  Cyclic GFR-binding peptide
EPLPVVYYEIVRKKPIFEQLSNDDSSNVI

SEQ ID NO: 120270 - protein, 27 aa, Artificial Sequence
  Cyclic GFR-binding peptide
RSVKIAKVVGRKPKVKEVQVDDSSNVI

SEQ ID NO: 120271 - protein, 27 aa, Artificial Sequence
  Cyclic GFR-binding peptide
RSVKMAKVDENEKVVKEVQVDDSSNVI

SEQ ID NO: 120272 - protein, 27 aa, Artificial Sequence
  Cyclic GFR-binding peptide
EPLPMVYYDENEKVVEQLSNDDSSNVI

SEQ ID NO: 120273 - protein, 27 aa, Artificial Sequence
  Cyclic GFR-binding peptide
RPVQVRKIDDSSNVIKKATVDDSSNVI

SEQ ID NO: 120274 - protein, 27 aa, Artificial Sequence
  Cyclic GFR-binding peptide
RSVKIAKVIGKTPKIKEVQVDDSSNVI

SEQ ID NO: 120275 - protein, 27 aa, Artificial Sequence
  Cyclic GFR-binding peptide
EPLTILYYIGKTPKIEQLSNDDSSNVI

SEQ ID NO: 120276 - protein, 29 aa, Artificial Sequence
  Cyclic GFR-binding peptide
EPLTVLYYEIVRKKPIFEQLSNDDSSNVI

SEQ ID NO: 120277 - protein, 27 aa, Artificial Sequence
  Cyclic GFR-binding peptide
RSVKVAKVDDSSNVIKEVQVDDSSNVI

SEQ ID NO: 120278 - protein, 27 aa, Artificial Sequence
  Cyclic GFR-binding peptide
EPLTVLYYDDSSNVIEQLSNDDSSNVI

SEQ ID NO: 120279 - protein, 29 aa, Artificial Sequence
  Cyclic GFR-binding peptide
RSVKVAKVEYVRKKPKLKEVQVDDSSNVI

SEQ ID NO: 120280 - protein, 29 aa, Artificial Sequence
  Cyclic GFR-binding peptide
RSVKVAKVEIVRKKPIFKEVQVDDSSNVI

SEQ ID NO: 120281 - protein, 29 aa, Artificial Sequence
  Cyclic GFR-binding peptide
RPVQMRKIRIKPHQGQHKKATVDDSSNVI

SEQ ID NO: 120282 - protein, 27 aa, Artificial Sequence
  Cyclic GFR-binding peptide
EPLTMLYYDENEKVVEQLSNDDSSNVI

SEQ ID NO: 120283 - protein, 29 aa, Artificial Sequence
  Cyclic GFR-binding peptide
SNITVQIMEIVRKKPIFIGEMSDDSSNVI

SEQ ID NO: 120284 - protein, 27 aa, Artificial Sequence
  Cyclic GFR-binding peptide
EPLPIVYYVGRKPKVEQLSNDDSSNVI

SEQ ID NO: 120285 - protein, 27 aa, Artificial Sequence
  Cyclic GFR-binding peptide
RPVQIRKIVGRKPKVKKATVDDSSNVI

SEQ ID NO: 120286 - protein, 27 aa, Artificial Sequence
  Cyclic GFR-binding peptide
EPLTILYYVGRTPKVEQLSNDDSSNVI

SEQ ID NO: 120287 - protein, 27 aa, Artificial Sequence
  Cyclic GFR-binding peptide
RSVKIAKVVGRTPKVKEVQVDDSSNVI

SEQ ID NO: 120288 - protein, 29 aa, Artificial Sequence
  Cyclic GFR-binding peptide
SNITVQIMEYVRKKPKLIGEMSDDSSNVI

SEQ ID NO: 120289 - protein, 27 aa, Artificial Sequence
  Cyclic GFR-binding peptide
EPLPMVYYDEYDKVVEQLSNDDSSNVI

SEQ ID NO: 120290 - protein, 27 aa, Artificial Sequence
  Cyclic GFR-binding peptide
RPVQIRKIVGRTPKVKKATVDDSSNVI

SEQ ID NO: 120291 - protein, 29 aa, Artificial Sequence
  Cyclic GFR-binding peptide
EPLTVLYYEYVRKKPKLEQLSNDDSSNVI

SEQ ID NO: 120292 - protein, 27 aa, Artificial Sequence
  Cyclic GFR-binding peptide
SNITIQIMVGRKPKVIGEMSDDSSNVI

SEQ ID NO: 120293 - protein, 27 aa, Artificial Sequence
  Cyclic GFR-binding peptide
SNITMQIMDENEKVVIGEMSDDSSNVI

SEQ ID NO: 120294 - protein, 27 aa, Artificial Sequence
  Cyclic GFR-binding peptide
SNITIQIMIGKTPKIIGEMSDDSSNVI

SEQ ID NO: 120295 - protein, 29 aa, Artificial Sequence
  Cyclic GFR-binding peptide
EPLTMLYYRIKPHQGQHEQLSNDDSSNVI

SEQ ID NO: 120296 - protein, 27 aa, Artificial Sequence
  Cyclic GFR-binding peptide
RPVQMRKIDEYDKVVKKATVDDSSNVI

SEQ ID NO: 120297 - protein, 29 aa, Artificial Sequence
  Cyclic GFR-binding peptide
EPLPMVYYRIKPHQGQHEQLSNDDSSNVI

SEQ ID NO: 120298 - protein, 29 aa, Artificial Sequence
  Cyclic GFR-binding peptide
EPLPVVYYEYVRKKPKLEQLSNDDSSNVI

SEQ ID NO: 120299 - protein, 29 aa, Artificial Sequence
  Cyclic GFR-binding peptide
RPVQVRKIEIVRKKPIFKKATVDDSSNVI

SEQ ID NO: 120300 - protein, 27 aa, Artificial Sequence
  Cyclic GFR-binding peptide
RSVKMAKVDEYDKVVKEVQVDDSSNVI

SEQ ID NO: 120301 - protein, 27 aa, Artificial Sequence
  Cyclic GFR-binding peptide
DDSSNVIRYKKLIIQQKDNFYLMSIAN

SEQ ID NO: 120302 - protein, 27 aa, Artificial Sequence
  Cyclic GFR-binding peptide
DDSSNVIRYKKLIVNNSSDFYLVSIAN

SEQ ID NO: 120303 - protein, 27 aa, Artificial Sequence
  Cyclic GFR-binding peptide
DDSSNVIRYKKLYTVVGKDFYLISIAN

SEQ ID NO: 120304 - protein, 27 aa, Artificial Sequence
  Cyclic GFR-binding peptide
DDSSNVIRYKKLIVNSSDDFYLVSIAN

SEQ ID NO: 120305 - protein, 27 aa, Artificial Sequence
  Cyclic GFR-binding peptide
DDSSNVIRYKKLVVKDYEDFYLMSIAN

SEQ ID NO: 120306 - protein, 27 aa, Artificial Sequence
  Cyclic GFR-binding peptide
DDSSNVIRYKKLLLVRGNDFYLMSIAN

SEQ ID NO: 120307 - protein, 27 aa, Artificial Sequence
  Cyclic GFR-binding peptide
DDSSNVIRYKKLVVKENEDFYLMSIAN

SEQ ID NO: 120308 - protein, 27 aa, Artificial Sequence
  Cyclic GFR-binding peptide
DDSSNVIRYKKLVVNNAADFYLISIAN

SEQ ID NO: 120309 - protein, 27 aa, Artificial Sequence
  Cyclic GFR-binding peptide
DDSSNVIRYKKLTPVGMDDFYLVSIAN

SEQ ID NO: 120310 - protein, 27 aa, Artificial Sequence
  Cyclic GFR-binding peptide
DDSSNVIRYKKLVVNNASDFYLISIAN

SEQ ID NO: 120311 - protein, 27 aa, Artificial Sequence
  Cyclic GFR-binding peptide
NAISMLYFNDKQQIILKKYRDDSSNVI

SEQ ID NO: 120312 - protein, 27 aa, Artificial Sequence
  Cyclic GFR-binding peptide
NAISVLYFDSSNNVILKKYRDDSSNVI

SEQ ID NO: 120313 - protein, 27 aa, Artificial Sequence
  Cyclic GFR-binding peptide
NAISILYFDKGVVTYLKKYRDDSSNVI

SEQ ID NO: 120314 - protein, 27 aa, Artificial Sequence
  Cyclic GFR-binding peptide
NAISVLYFDDSSNVILKKYRDDSSNVI

SEQ ID NO: 120315 - protein, 27 aa, Artificial Sequence
  Cyclic GFR-binding peptide
NAISMLYFDEYDKVVLKKYRDDSSNVI

SEQ ID NO: 120316 - protein, 27 aa, Artificial Sequence
  Cyclic GFR-binding peptide
NAISMLYFDNGRVLLLKKYRDDSSNVI

SEQ ID NO: 120317 - protein, 27 aa, Artificial Sequence
  Cyclic GFR-binding peptide
NAISMLYFDENEKVVLKKYRDDSSNVI

SEQ ID NO: 120318 - protein, 27 aa, Artificial Sequence
  Cyclic GFR-binding peptide
NAISILYFDAANNVVLKKYRDDSSNVI

SEQ ID NO: 120319 - protein, 27 aa, Artificial Sequence
  Cyclic GFR-binding peptide
NAISVLYFDDMGVPTLKKYRDDSSNVI

SEQ ID NO: 120320 - protein, 27 aa, Artificial Sequence
  Cyclic GFR-binding peptide
NAISILYFDSANNVVLKKYRDDSSNVI

SEQ ID NO: 120321 - protein, 27 aa, Artificial Sequence
  Cyclic GFR-binding peptide
DDSSNVIEYKFKVKPTRGVLYLISIPE

SEQ ID NO: 120322 - protein, 27 aa, Artificial Sequence
  Cyclic GFR-binding peptide
DDSSNVIYHYKLVVKDYEDKYLMSIPS

SEQ ID NO: 120323 - protein, 27 aa, Artificial Sequence
  Cyclic GFR-binding peptide
DDSSNVIEYKFKTPVGMDDLYLVSIPE

SEQ ID NO: 120324 - protein, 27 aa, Artificial Sequence
  Cyclic GFR-binding peptide
DDSSNVIRYKKLVVKDYEDFYLMSIAN

SEQ ID NO: 120325 - protein, 27 aa, Artificial Sequence
  Cyclic GFR-binding peptide
DDSSNVIRHKRLVKPKRGVYYLISTAS

SEQ ID NO: 120326 - protein, 27 aa, Artificial Sequence
  Cyclic GFR-binding peptide
DDSSNVIYHYKLVKPKRGVKYLISIPS

SEQ ID NO: 120327 - protein, 27 aa, Artificial Sequence
  Cyclic GFR-binding peptide
DDSSNVIEYKFKIKPTKGILYLISIPE

SEQ ID NO: 120328 - protein, 27 aa, Artificial Sequence
  Cyclic GFR-binding peptide
DDSSNVIEYKFKVVNKNEDLYLISIPE

SEQ ID NO: 120329 - protein, 27 aa, Artificial Sequence
  Cyclic GFR-binding peptide
DDSSNVIPIKGYVKPTRGVFYLINIPS

SEQ ID NO: 120330 - protein, 27 aa, Artificial Sequence
  Cyclic GFR-binding peptide
DDSSNVIPIKGYVVKENEDFYLMNIPS

SEQ ID NO: 120331 - protein, 27 aa, Artificial Sequence
  Cyclic GFR-binding peptide
DDSSNVIYHYKLYTVVGKDKYLISIPS

SEQ ID NO: 120332 - protein, 27 aa, Artificial Sequence
  Cyclic GFR-binding peptide
DDSSNVIEYKFKLLVRGNDLYLMSIPE

SEQ ID NO: 120333 - protein, 27 aa, Artificial Sequence
  Cyclic GFR-binding peptide
DDSSNVIRYKKLVKPKRGVFYLISIAN

SEQ ID NO: 120334 - protein, 27 aa, Artificial Sequence
  Cyclic GFR-binding peptide
DDSSNVIPIKGYTPVGMDDFYLVNIPS

SEQ ID NO: 120335 - protein, 27 aa, Artificial Sequence
  Cyclic GFR-binding peptide
DDSSNVIYHYKLVVNKNEDKYLISIPS

SEQ ID NO: 120336 - protein, 27 aa, Artificial Sequence
  Cyclic GFR-binding peptide
DDSSNVIYHYKLIVNSSDDKYLVSIPS

SEQ ID NO: 120337 - protein, 27 aa, Artificial Sequence
  Cyclic GFR-binding peptide
DDSSNVIPIKGYIVNSSDDFYLVNIPS

SEQ ID NO: 120338 - protein, 27 aa, Artificial Sequence
  Cyclic GFR-binding peptide
DDSSNVIRYKKLYTVVGKDFYLISIAN

SEQ ID NO: 120339 - protein, 27 aa, Artificial Sequence
  Cyclic GFR-binding peptide
DDSSNVIRHKRLLLVRGNDYYLMSTAS

SEQ ID NO: 120340 - protein, 27 aa, Artificial Sequence
  Cyclic GFR-binding peptide
DDSSNVIYHYKLLLVRGNDKYLMSIPS

SEQ ID NO: 120341 - protein, 27 aa, Artificial Sequence
  Cyclic GFR-binding peptide
DDSSNVIRYKKLIVNSSDDFYLVSIAN

SEQ ID NO: 120342 - protein, 27 aa, Artificial Sequence
  Cyclic GFR-binding peptide
DDSSNVIRHKRLVVNKNEDYYLISTAS

SEQ ID NO: 120343 - protein, 27 aa, Artificial Sequence
  Cyclic GFR-binding peptide
DDSSNVIRHKRLIKPTKGIYYLISTAS

SEQ ID NO: 120344 - protein, 27 aa, Artificial Sequence
  Cyclic GFR-binding peptide
DDSSNVIPIKGYYTVVGKDFYLINIPS

SEQ ID NO: 120345 - protein, 27 aa, Artificial Sequence
  Cyclic GFR-binding peptide
DDSSNVIYHYKLTPVGMDDKYLVSIPS

SEQ ID NO: 120346 - protein, 27 aa, Artificial Sequence
  Cyclic GFR-binding peptide
DDSSNVIRHKRLIVNNSSDYYLVSTAS

SEQ ID NO: 120347 - protein, 27 aa, Artificial Sequence
  Cyclic GFR-binding peptide
DDSSNVIRYKKLLLVRGNDFYLMSIAN

SEQ ID NO: 120348 - protein, 27 aa, Artificial Sequence
  Cyclic GFR-binding peptide
DDSSNVIYHYKLVKPTRGVKYLISIPS

SEQ ID NO: 120349 - protein, 27 aa, Artificial Sequence
  Cyclic GFR-binding peptide
DDSSNVIRHKRLIVNSSDDYYLVSTAS

SEQ ID NO: 120350 - protein, 27 aa, Artificial Sequence
  Cyclic GFR-binding peptide
DDSSNVIPIKGYLLVRGNDFYLMNIPS

SEQ ID NO: 120351 - protein, 27 aa, Artificial Sequence
  Cyclic GFR-binding peptide
DDSSNVIRYKKLVVNKNEDFYLISIAN

SEQ ID NO: 120352 - protein, 27 aa, Artificial Sequence
  Cyclic GFR-binding peptide
DDSSNVIEYKFKVVKDYEDLYLMSIPE

SEQ ID NO: 120353 - protein, 27 aa, Artificial Sequence
  Cyclic GFR-binding peptide
DDSSNVIPIKGYVVNKNEDFYLINIPS

SEQ ID NO: 120354 - protein, 27 aa, Artificial Sequence
  Cyclic GFR-binding peptide
DDSSNVIPIKGYIKPTKGIFYLINIPS

SEQ ID NO: 120355 - protein, 27 aa, Artificial Sequence
  Cyclic GFR-binding peptide
DDSSNVIEYKFKVVNNAADLYLISIPE

SEQ ID NO: 120356 - protein, 27 aa, Artificial Sequence
  Cyclic GFR-binding peptide
DDSSNVIRHKRLYTVVGKDYYLISTAS

SEQ ID NO: 120357 - protein, 27 aa, Artificial Sequence
  Cyclic GFR-binding peptide
DDSSNVIRYKKLIKPTKGIFYLISIAN

SEQ ID NO: 120358 - protein, 27 aa, Artificial Sequence
  Cyclic GFR-binding peptide
DDSSNVIPIKGYVVKDYEDFYLMNIPS

SEQ ID NO: 120359 - protein, 27 aa, Artificial Sequence
  Cyclic GFR-binding peptide
DDSSNVIEYKFKVVNNASDLYLISIPE

SEQ ID NO: 120360 - protein, 27 aa, Artificial Sequence
  Cyclic GFR-binding peptide
DDSSNVIRYKKLVKPTRGVFYLISIAN

SEQ ID NO: 120361 - protein, 27 aa, Artificial Sequence
  Cyclic GFR-binding peptide
DDSSNVIRHKRLVVKENEDYYLMSTAS

SEQ ID NO: 120362 - protein, 27 aa, Artificial Sequence
  Cyclic GFR-binding peptide
DDSSNVIYHYKLIKPTKGIKYLISIPS

SEQ ID NO: 120363 - protein, 27 aa, Artificial Sequence
  Cyclic GFR-binding peptide
DDSSNVIYHYKLVVKENEDKYLMSIPS

SEQ ID NO: 120364 - protein, 27 aa, Artificial Sequence
  Cyclic GFR-binding peptide
DDSSNVIRHKRLIIQQKDNYYLMSTAS

SEQ ID NO: 120365 - protein, 27 aa, Artificial Sequence
  Cyclic GFR-binding peptide
DDSSNVIRYKKLVVKENEDFYLMSIAN

SEQ ID NO: 120366 - protein, 27 aa, Artificial Sequence
  Cyclic GFR-binding peptide
DDSSNVIRYKKLVVNNAADFYLISIAN

SEQ ID NO: 120367 - protein, 27 aa, Artificial Sequence
  Cyclic GFR-binding peptide
DDSSNVIEYKFKIIQQKDNLYLMSIPE

SEQ ID NO: 120368 - protein, 27 aa, Artificial Sequence
  Cyclic GFR-binding peptide
DDSSNVIRYKKLTPVGMDDFYLVSIAN

SEQ ID NO: 120369 - protein, 27 aa, Artificial Sequence
  Cyclic GFR-binding peptide
DDSSNVIYHYKLVVNNAADKYLISIPS

SEQ ID NO: 120370 - protein, 27 aa, Artificial Sequence
  Cyclic GFR-binding peptide
DDSSNVIPIKGYIVNNSSDFYLVNIPS

SEQ ID NO: 120371 - protein, 27 aa, Artificial Sequence
  Cyclic GFR-binding peptide
DDSSNVIPIKGYVKPKRGVFYLINIPS

SEQ ID NO: 120372 - protein, 27 aa, Artificial Sequence
  Cyclic GFR-binding peptide
DDSSNVIRYKKLIIQQKDNFYLMSIAN

SEQ ID NO: 120373 - protein, 27 aa, Artificial Sequence
  Cyclic GFR-binding peptide
DDSSNVIPIKGYIIQQKDNFYLMNIPS

SEQ ID NO: 120374 - protein, 27 aa, Artificial Sequence
  Cyclic GFR-binding peptide
DDSSNVIRYKKLIVNNSSDFYLVSIAN

SEQ ID NO: 120375 - protein, 27 aa, Artificial Sequence
  Cyclic GFR-binding peptide
DDSSNVIPIKGYVVNNAADFYLINIPS

SEQ ID NO: 120376 - protein, 27 aa, Artificial Sequence
  Cyclic GFR-binding peptide
DDSSNVIRHKRLVKPTRGVYYLISTAS

SEQ ID NO: 120377 - protein, 27 aa, Artificial Sequence
  Cyclic GFR-binding peptide
DDSSNVIEYKFKIVNNSSDLYLVSIPE

SEQ ID NO: 120378 - protein, 27 aa, Artificial Sequence
  Cyclic GFR-binding peptide
DDSSNVIRHKRLVVNNASDYYLISTAS

SEQ ID NO: 120379 - protein, 27 aa, Artificial Sequence
  Cyclic GFR-binding peptide
DDSSNVIRHKRLTPVGMDDYYLVSTAS

SEQ ID NO: 120380 - protein, 27 aa, Artificial Sequence
  Cyclic GFR-binding peptide
DDSSNVIYHYKLIVNNSSDKYLVSIPS

SEQ ID NO: 120381 - protein, 27 aa, Artificial Sequence
  Cyclic GFR-binding peptide
DDSSNVIYHYKLVVNNASDKYLISIPS

SEQ ID NO: 120382 - protein, 27 aa, Artificial Sequence
  Cyclic GFR-binding peptide
DDSSNVIEYKFKIVNSSDDLYLVSIPE

SEQ ID NO: 120383 - protein, 27 aa, Artificial Sequence
  Cyclic GFR-binding peptide
DDSSNVIEYKFKVKPKRGVLYLISIPE

SEQ ID NO: 120384 - protein, 27 aa, Artificial Sequence
  Cyclic GFR-binding peptide
DDSSNVIRHKRLVVKDYEDYYLMSTAS

SEQ ID NO: 120385 - protein, 27 aa, Artificial Sequence
  Cyclic GFR-binding peptide
DDSSNVIEYKFKVVKENEDLYLMSIPE

SEQ ID NO: 120386 - protein, 27 aa, Artificial Sequence
  Cyclic GFR-binding peptide
DDSSNVIEYKFKYTVVGKDLYLISIPE

SEQ ID NO: 120387 - protein, 27 aa, Artificial Sequence
  Cyclic GFR-binding peptide
DDSSNVIPIKGYVVNNASDFYLINIPS

SEQ ID NO: 120388 - protein, 27 aa, Artificial Sequence
  Cyclic GFR-binding peptide
DDSSNVIYHYKLIIQQKDNKYLMSIPS

SEQ ID NO: 120389 - protein, 27 aa, Artificial Sequence
  Cyclic GFR-binding peptide
DDSSNVIRYKKLVVNNASDFYLISIAN

SEQ ID NO: 120390 - protein, 27 aa, Artificial Sequence
  Cyclic GFR-binding peptide
DDSSNVIRHKRLVVNNAADYYLISTAS

SEQ ID NO: 120391 - protein, 27 aa, Artificial Sequence
  Cyclic GFR-binding peptide
EPISILYLVGRTPKVKFKYEDDSSNVI

SEQ ID NO: 120392 - protein, 27 aa, Artificial Sequence
  Cyclic GFR-binding peptide
SPISMLYKDEYDKVVLKYHYDDSSNVI

SEQ ID NO: 120393 - protein, 27 aa, Artificial Sequence
  Cyclic GFR-binding peptide
EPISVLYLDDMGVPTKFKYEDDSSNVI

SEQ ID NO: 120394 - protein, 27 aa, Artificial Sequence
  Cyclic GFR-binding peptide
NAISMLYFDEYDKVVLKKYRDDSSNVI

SEQ ID NO: 120395 - protein, 27 aa, Artificial Sequence
  Cyclic GFR-binding peptide
SATSILYYVGRKPKVLRKHRDDSSNVI

SEQ ID NO: 120396 - protein, 27 aa, Artificial Sequence
  Cyclic GFR-binding peptide
SPISILYKVGRKPKVLKYHYDDSSNVI

SEQ ID NO: 120397 - protein, 27 aa, Artificial Sequence
  Cyclic GFR-binding peptide
EPISILYLIGKTPKIKFKYEDDSSNVI

SEQ ID NO: 120398 - protein, 27 aa, Artificial Sequence
  Cyclic GFR-binding peptide
EPISILYLDENKNVVKFKYEDDSSNVI

SEQ ID NO: 120399 - protein, 27 aa, Artificial Sequence
  Cyclic GFR-binding peptide
SPINILYFVGRTPKVYGKIPDDSSNVI

SEQ ID NO: 120400 - protein, 27 aa, Artificial Sequence
  Cyclic GFR-binding peptide
SPINMLYFDENEKVVYGKIPDDSSNVI

SEQ ID NO: 120401 - protein, 27 aa, Artificial Sequence
  Cyclic GFR-binding peptide
SPISILYKDKGVVTYLKYHYDDSSNVI

SEQ ID NO: 120402 - protein, 27 aa, Artificial Sequence
  Cyclic GFR-binding peptide
EPISMLYLDNGRVLLKFKYEDDSSNVI

SEQ ID NO: 120403 - protein, 27 aa, Artificial Sequence
  Cyclic GFR-binding peptide
NAISILYFVGRKPKVLKKYRDDSSNVI

SEQ ID NO: 120404 - protein, 27 aa, Artificial Sequence
  Cyclic GFR-binding peptide
SPINVLYFDDMGVPTYGKIPDDSSNVI

SEQ ID NO: 120405 - protein, 27 aa, Artificial Sequence
  Cyclic GFR-binding peptide
SPISILYKDENKNVVLKYHYDDSSNVI

SEQ ID NO: 120406 - protein, 27 aa, Artificial Sequence
  Cyclic GFR-binding peptide
SPISVLYKDDSSNVILKYHYDDSSNVI

SEQ ID NO: 120407 - protein, 27 aa, Artificial Sequence
  Cyclic GFR-binding peptide
SPINVLYFDDSSNVIYGKIPDDSSNVI

SEQ ID NO: 120408 - protein, 27 aa, Artificial Sequence
  Cyclic GFR-binding peptide
NAISILYFDKGVVTYLKKYRDDSSNVI

SEQ ID NO: 120409 - protein, 27 aa, Artificial Sequence
  Cyclic GFR-binding peptide
SATSMLYYDNGRVLLLRKHRDDSSNVI

SEQ ID NO: 120410 - protein, 27 aa, Artificial Sequence
  Cyclic GFR-binding peptide
SPISMLYKDNGRVLLLKYHYDDSSNVI

SEQ ID NO: 120411 - protein, 27 aa, Artificial Sequence
  Cyclic GFR-binding peptide
NAISVLYFDDSSNVILKKYRDDSSNVI

SEQ ID NO: 120412 - protein, 27 aa, Artificial Sequence
  Cyclic GFR-binding peptide
SATSILYYDENKNVVLRKHRDDSSNVI

SEQ ID NO: 120413 - protein, 27 aa, Artificial Sequence
  Cyclic GFR-binding peptide
SATSILYYIGKTPKILRKHRDDSSNVI

SEQ ID NO: 120414 - protein, 27 aa, Artificial Sequence
  Cyclic GFR-binding peptide
SPINILYFDKGVVTYYGKIPDDSSNVI

SEQ ID NO: 120415 - protein, 27 aa, Artificial Sequence
  Cyclic GFR-binding peptide
SPISVLYKDDMGVPTLKYHYDDSSNVI

SEQ ID NO: 120416 - protein, 27 aa, Artificial Sequence
  Cyclic GFR-binding peptide
SATSVLYYDSSNNVILRKHRDDSSNVI

SEQ ID NO: 120417 - protein, 27 aa, Artificial Sequence
  Cyclic GFR-binding peptide
NAISMLYFDNGRVLLLKKYRDDSSNVI

SEQ ID NO: 120418 - protein, 27 aa, Artificial Sequence
  Cyclic GFR-binding peptide
SPISILYKVGRTPKVLKYHYDDSSNVI

SEQ ID NO: 120419 - protein, 27 aa, Artificial Sequence
  Cyclic GFR-binding peptide
SATSVLYYDDSSNVILRKHRDDSSNVI

SEQ ID NO: 120420 - protein, 27 aa, Artificial Sequence
  Cyclic GFR-binding peptide
SPINMLYFDNGRVLLYGKIPDDSSNVI

SEQ ID NO: 120421 - protein, 27 aa, Artificial Sequence
  Cyclic GFR-binding peptide
NAISILYFDENKNVVLKKYRDDSSNVI

SEQ ID NO: 120422 - protein, 27 aa, Artificial Sequence
  Cyclic GFR-binding peptide
EPISMLYLDEYDKVVKFKYEDDSSNVI

SEQ ID NO: 120423 - protein, 27 aa, Artificial Sequence
  Cyclic GFR-binding peptide
SPINILYFDENKNVVYGKIPDDSSNVI

SEQ ID NO: 120424 - protein, 27 aa, Artificial Sequence
  Cyclic GFR-binding peptide
SPINILYFIGKTPKIYGKIPDDSSNVI

SEQ ID NO: 120425 - protein, 27 aa, Artificial Sequence
  Cyclic GFR-binding peptide
EPISILYLDAANNVVKFKYEDDSSNVI

SEQ ID NO: 120426 - protein, 27 aa, Artificial Sequence
  Cyclic GFR-binding peptide
SATSILYYDKGVVTYLRKHRDDSSNVI

SEQ ID NO: 120427 - protein, 27 aa, Artificial Sequence
  Cyclic GFR-binding peptide
NAISILYFIGKTPKILKKYRDDSSNVI

SEQ ID NO: 120428 - protein, 27 aa, Artificial Sequence
  Cyclic GFR-binding peptide
SPINMLYFDEYDKVVYGKIPDDSSNVI

SEQ ID NO: 120429 - protein, 27 aa, Artificial Sequence
  Cyclic GFR-binding peptide
EPISILYLDSANNVVKFKYEDDSSNVI

SEQ ID NO: 120430 - protein, 27 aa, Artificial Sequence
  Cyclic GFR-binding peptide
NAISILYFVGRTPKVLKKYRDDSSNVI

SEQ ID NO: 120431 - protein, 27 aa, Artificial Sequence
  Cyclic GFR-binding peptide
SATSMLYYDENEKVVLRKHRDDSSNVI

SEQ ID NO: 120432 - protein, 27 aa, Artificial Sequence
  Cyclic GFR-binding peptide
SPISILYKIGKTPKILKYHYDDSSNVI

SEQ ID NO: 120433 - protein, 27 aa, Artificial Sequence
  Cyclic GFR-binding peptide
SPISMLYKDENEKVVLKYHYDDSSNVI

SEQ ID NO: 120434 - protein, 27 aa, Artificial Sequence
  Cyclic GFR-binding peptide
SATSMLYYNDKQQIILRKHRDDSSNVI

SEQ ID NO: 120435 - protein, 27 aa, Artificial Sequence
  Cyclic GFR-binding peptide
NAISMLYFDENEKVVLKKYRDDSSNVI

SEQ ID NO: 120436 - protein, 27 aa, Artificial Sequence
  Cyclic GFR-binding peptide
NAISILYFDAANNVVLKKYRDDSSNVI

SEQ ID NO: 120437 - protein, 27 aa, Artificial Sequence
  Cyclic GFR-binding peptide
EPISMLYLNDKQQIIKFKYEDDSSNVI

SEQ ID NO: 120438 - protein, 27 aa, Artificial Sequence
  Cyclic GFR-binding peptide
NAISVLYFDDMGVPTLKKYRDDSSNVI

SEQ ID NO: 120439 - protein, 27 aa, Artificial Sequence
  Cyclic GFR-binding peptide
SPISILYKDAANNVVLKYHYDDSSNVI

SEQ ID NO: 120440 - protein, 27 aa, Artificial Sequence
  Cyclic GFR-binding peptide
SPINVLYFDSSNNVIYGKIPDDSSNVI

SEQ ID NO: 120441 - protein, 27 aa, Artificial Sequence
  Cyclic GFR-binding peptide
SPINILYFVGRKPKVYGKIPDDSSNVI

SEQ ID NO: 120442 - protein, 27 aa, Artificial Sequence
  Cyclic GFR-binding peptide
NAISMLYFNDKQQIILKKYRDDSSNVI

SEQ ID NO: 120443 - protein, 27 aa, Artificial Sequence
  Cyclic GFR-binding peptide
SPINMLYFNDKQQIIYGKIPDDSSNVI

SEQ ID NO: 120444 - protein, 27 aa, Artificial Sequence
  Cyclic GFR-binding peptide
NAISVLYFDSSNNVILKKYRDDSSNVI

SEQ ID NO: 120445 - protein, 27 aa, Artificial Sequence
  Cyclic GFR-binding peptide
SPINILYFDAANNVVYGKIPDDSSNVI

SEQ ID NO: 120446 - protein, 27 aa, Artificial Sequence
  Cyclic GFR-binding peptide
SATSILYYVGRTPKVLRKHRDDSSNVI

SEQ ID NO: 120447 - protein, 27 aa, Artificial Sequence
  Cyclic GFR-binding peptide
EPISVLYLDSSNNVIKFKYEDDSSNVI

SEQ ID NO: 120448 - protein, 27 aa, Artificial Sequence
  Cyclic GFR-binding peptide
SATSILYYDSANNVVLRKHRDDSSNVI

SEQ ID NO: 120449 - protein, 27 aa, Artificial Sequence
  Cyclic GFR-binding peptide
SATSVLYYDDMGVPTLRKHRDDSSNVI

SEQ ID NO: 120450 - protein, 27 aa, Artificial Sequence
  Cyclic GFR-binding peptide
SPISVLYKDSSNNVILKYHYDDSSNVI

SEQ ID NO: 120451 - protein, 27 aa, Artificial Sequence
  Cyclic GFR-binding peptide
SPISILYKDSANNVVLKYHYDDSSNVI

SEQ ID NO: 120452 - protein, 27 aa, Artificial Sequence
  Cyclic GFR-binding peptide
EPISVLYLDDSSNVIKFKYEDDSSNVI

SEQ ID NO: 120453 - protein, 27 aa, Artificial Sequence
  Cyclic GFR-binding peptide
EPISILYLVGRKPKVKFKYEDDSSNVI

SEQ ID NO: 120454 - protein, 27 aa, Artificial Sequence
  Cyclic GFR-binding peptide
SATSMLYYDEYDKVVLRKHRDDSSNVI

SEQ ID NO: 120455 - protein, 27 aa, Artificial Sequence
  Cyclic GFR-binding peptide
EPISMLYLDENEKVVKFKYEDDSSNVI

SEQ ID NO: 120456 - protein, 27 aa, Artificial Sequence
  Cyclic GFR-binding peptide
EPISILYLDKGVVTYKFKYEDDSSNVI

SEQ ID NO: 120457 - protein, 27 aa, Artificial Sequence
  Cyclic GFR-binding peptide
SPINILYFDSANNVVYGKIPDDSSNVI

SEQ ID NO: 120458 - protein, 27 aa, Artificial Sequence
  Cyclic GFR-binding peptide
SPISMLYKNDKQQIILKYHYDDSSNVI

SEQ ID NO: 120459 - protein, 27 aa, Artificial Sequence
  Cyclic GFR-binding peptide
NAISILYFDSANNVVLKKYRDDSSNVI

SEQ ID NO: 120460 - protein, 27 aa, Artificial Sequence
  Cyclic GFR-binding peptide
SATSILYYDAANNVVLRKHRDDSSNVI

SEQ ID NO: 120461 - protein, 27 aa, Artificial Sequence
  Cyclic GFR-binding peptide
DDSSNVISMEGIIIQQKDNMIQMTINS

SEQ ID NO: 120462 - protein, 27 aa, Artificial Sequence
  Cyclic GFR-binding peptide
DDSSNVISMEGIIVNSSDDMIQVTINS

SEQ ID NO: 120463 - protein, 27 aa, Artificial Sequence
  Cyclic GFR-binding peptide
DDSSNVISMEGLVKPKRGVMIQITINS

SEQ ID NO: 120464 - protein, 27 aa, Artificial Sequence
  Cyclic GFR-binding peptide
DDSSNVISMEGLVVNNASDMIQITINS

SEQ ID NO: 120465 - protein, 29 aa, Artificial Sequence
  Cyclic GFR-binding peptide
DDSSNVISMEGIFIPKKRVIEMIQVTINS

SEQ ID NO: 120466 - protein, 27 aa, Artificial Sequence
  Cyclic GFR-binding peptide
DDSSNVISMEGILLVRGNDMIQMTINS

SEQ ID NO: 120467 - protein, 29 aa, Artificial Sequence
  Cyclic GFR-binding peptide
DDSSNVISMEGILKPKKRVYEMIQVTINS

SEQ ID NO: 120468 - protein, 27 aa, Artificial Sequence
  Cyclic GFR-binding peptide
DDSSNVISMEGLIKPTKGIMIQITINS

SEQ ID NO: 120469 - protein, 27 aa, Artificial Sequence
  Cyclic GFR-binding peptide
DDSSNVISMEGLIVNSSDDMIQVTINS

SEQ ID NO: 120470 - protein, 29 aa, Artificial Sequence
  Cyclic GFR-binding peptide
DDSSNVISMEGIHQGQHPKIRMIQMTINS

SEQ ID NO: 120471 - protein, 27 aa, Artificial Sequence
  Cyclic GFR-binding peptide
DDSSNVISMEGIVVNNASDMIQITINS

SEQ ID NO: 120472 - protein, 29 aa, Artificial Sequence
  Cyclic GFR-binding peptide
DDSSNVISMEGLLKPKKRVYEMIQVTINS

SEQ ID NO: 120473 - protein, 27 aa, Artificial Sequence
  Cyclic GFR-binding peptide
DDSSNVISMEGIVKPKRGVMIQITINS

SEQ ID NO: 120474 - protein, 27 aa, Artificial Sequence
  Cyclic GFR-binding peptide
DDSSNVISMEGIVKPTRGVMIQITINS

SEQ ID NO: 120475 - protein, 27 aa, Artificial Sequence
  Cyclic GFR-binding peptide
DDSSNVISMEGLVVNNAADMIQITINS

SEQ ID NO: 120476 - protein, 27 aa, Artificial Sequence
  Cyclic GFR-binding peptide
DDSSNVISMEGLLLVRGNDMIQMTINS

SEQ ID NO: 120477 - protein, 27 aa, Artificial Sequence
  Cyclic GFR-binding peptide
DDSSNVISMEGIIKPTKGIMIQITINS

SEQ ID NO: 120478 - protein, 27 aa, Artificial Sequence
  Cyclic GFR-binding peptide
DDSSNVISMEGLIIQQKDNMIQMTINS

SEQ ID NO: 120479 - protein, 29 aa, Artificial Sequence
  Cyclic GFR-binding peptide
DDSSNVISMEGLHQGQHPKIRMIQMTINS

SEQ ID NO: 120480 - protein, 27 aa, Artificial Sequence
  Cyclic GFR-binding peptide
DDSSNVISMEGIVVNNAADMIQITINS

SEQ ID NO: 120481 - protein, 29 aa, Artificial Sequence
  Cyclic GFR-binding peptide
DDSSNVISMEGLFIPKKRVIEMIQVTINS

SEQ ID NO: 120482 - protein, 27 aa, Artificial Sequence
  Cyclic GFR-binding peptide
DDSSNVISMEGLVKPTRGVMIQITINS

SEQ ID NO: 120483 - protein, 27 aa, Artificial Sequence
  Cyclic GFR-binding peptide
SNITMQIMNDKQQIIIGEMSDDSSNVI

SEQ ID NO: 120484 - protein, 27 aa, Artificial Sequence
  Cyclic GFR-binding peptide
SNITVQIMDDSSNVIIGEMSDDSSNVI

SEQ ID NO: 120485 - protein, 27 aa, Artificial Sequence
  Cyclic GFR-binding peptide
SNITIQIMVGRKPKVLGEMSDDSSNVI

SEQ ID NO: 120486 - protein, 27 aa, Artificial Sequence
  Cyclic GFR-binding peptide
SNITIQIMDSANNVVLGEMSDDSSNVI

SEQ ID NO: 120487 - protein, 29 aa, Artificial Sequence
  Cyclic GFR-binding peptide
SNITVQIMEIVRKKPIFIGEMSDDSSNVI

SEQ ID NO: 120488 - protein, 27 aa, Artificial Sequence
  Cyclic GFR-binding peptide
SNITMQIMDNGRVLLIGEMSDDSSNVI

SEQ ID NO: 120489 - protein, 29 aa, Artificial Sequence
  Cyclic GFR-binding peptide
SNITVQIMEYVRKKPKLIGEMSDDSSNVI

SEQ ID NO: 120490 - protein, 27 aa, Artificial Sequence
  Cyclic GFR-binding peptide
SNITIQIMIGKTPKILGEMSDDSSNVI

SEQ ID NO: 120491 - protein, 27 aa, Artificial Sequence
  Cyclic GFR-binding peptide
SNITVQIMDDSSNVILGEMSDDSSNVI

SEQ ID NO: 120492 - protein, 29 aa, Artificial Sequence
  Cyclic GFR-binding peptide
SNITMQIMRIKPHQGQHIGEMSDDSSNVI

SEQ ID NO: 120493 - protein, 27 aa, Artificial Sequence
  Cyclic GFR-binding peptide
SNITIQIMDSANNVVIGEMSDDSSNVI

SEQ ID NO: 120494 - protein, 29 aa, Artificial Sequence
  Cyclic GFR-binding peptide
SNITVQIMEYVRKKPKLLGEMSDDSSNVI

SEQ ID NO: 120495 - protein, 27 aa, Artificial Sequence
  Cyclic GFR-binding peptide
SNITIQIMVGRKPKVIGEMSDDSSNVI

SEQ ID NO: 120496 - protein, 27 aa, Artificial Sequence
  Cyclic GFR-binding peptide
SNITIQIMVGRTPKVIGEMSDDSSNVI

SEQ ID NO: 120497 - protein, 27 aa, Artificial Sequence
  Cyclic GFR-binding peptide
SNITIQIMDAANNVVLGEMSDDSSNVI

SEQ ID NO: 120498 - protein, 27 aa, Artificial Sequence
  Cyclic GFR-binding peptide
SNITMQIMDNGRVLLLGEMSDDSSNVI

SEQ ID NO: 120499 - protein, 27 aa, Artificial Sequence
  Cyclic GFR-binding peptide
SNITIQIMIGKTPKIIGEMSDDSSNVI

SEQ ID NO: 120500 - protein, 27 aa, Artificial Sequence
  Cyclic GFR-binding peptide
SNITMQIMNDKQQIILGEMSDDSSNVI

SEQ ID NO: 120501 - protein, 29 aa, Artificial Sequence
  Cyclic GFR-binding peptide
SNITMQIMRIKPHQGQHLGEMSDDSSNVI

SEQ ID NO: 120502 - protein, 27 aa, Artificial Sequence
  Cyclic GFR-binding peptide
SNITIQIMDAANNVVIGEMSDDSSNVI

SEQ ID NO: 120503 - protein, 29 aa, Artificial Sequence
  Cyclic GFR-binding peptide
SNITVQIMEIVRKKPIFLGEMSDDSSNVI

SEQ ID NO: 120504 - protein, 27 aa, Artificial Sequence
  Cyclic GFR-binding peptide
SNITIQIMVGRTPKVLGEMSDDSSNVI

SEQ ID NO: 120505 - protein, 27 aa, Artificial Sequence
  Cyclic GFR-binding peptide
DDSSNVIRYKKLIKPTKGIFYLISIAN

SEQ ID NO: 120506 - protein, 27 aa, Artificial Sequence
  Cyclic GFR-binding peptide
DDSSNVIQYNKLVVNKNEDLYLISIAS

SEQ ID NO: 120507 - protein, 27 aa, Artificial Sequence
  Cyclic GFR-binding peptide
DDSSNVIQYNKLVVNNAADLYLISIAS

SEQ ID NO: 120508 - protein, 27 aa, Artificial Sequence
  Cyclic GFR-binding peptide
DDSSNVIQYNKLIVNNSSDLYLVSIAS

SEQ ID NO: 120509 - protein, 27 aa, Artificial Sequence
  Cyclic GFR-binding peptide
DDSSNVIRYKKLVVKDYEDFYLMSIAN

SEQ ID NO: 120510 - protein, 27 aa, Artificial Sequence
  Cyclic GFR-binding peptide
DDSSNVIRYKKLVKPTRGVFYLISIAN

SEQ ID NO: 120511 - protein, 27 aa, Artificial Sequence
  Cyclic GFR-binding peptide
DDSSNVIQYNKLIIQQKDNLYLMSIAS

SEQ ID NO: 120512 - protein, 27 aa, Artificial Sequence
  Cyclic GFR-binding peptide
DDSSNVIQYNKLLLVRGNDLYLMSIAS

SEQ ID NO: 120513 - protein, 27 aa, Artificial Sequence
  Cyclic GFR-binding peptide
DDSSNVIQYNKLVKPTRGVLYLISIAS

SEQ ID NO: 120514 - protein, 27 aa, Artificial Sequence
  Cyclic GFR-binding peptide
DDSSNVIRYKKLVVKENEDFYLMSIAN

SEQ ID NO: 120515 - protein, 27 aa, Artificial Sequence
  Cyclic GFR-binding peptide
DDSSNVIRYKKLVVNNAADFYLISIAN

SEQ ID NO: 120516 - protein, 27 aa, Artificial Sequence
  Cyclic GFR-binding peptide
DDSSNVIQYNKLTPVGMDDLYLVSIAS

SEQ ID NO: 120517 - protein, 27 aa, Artificial Sequence
  Cyclic GFR-binding peptide
DDSSNVIRYKKLTPVGMDDFYLVSIAN

SEQ ID NO: 120518 - protein, 27 aa, Artificial Sequence
  Cyclic GFR-binding peptide
DDSSNVIRYKKLVKPKRGVFYLISIAN

SEQ ID NO: 120519 - protein, 27 aa, Artificial Sequence
  Cyclic GFR-binding peptide
DDSSNVIQYNKLVVKENEDLYLMSIAS

SEQ ID NO: 120520 - protein, 27 aa, Artificial Sequence
  Cyclic GFR-binding peptide
DDSSNVIRYKKLIIQQKDNFYLMSIAN

SEQ ID NO: 120521 - protein, 27 aa, Artificial Sequence
  Cyclic GFR-binding peptide
DDSSNVIQYNKLVKPKRGVLYLISIAS

SEQ ID NO: 120522 - protein, 27 aa, Artificial Sequence
  Cyclic GFR-binding peptide
DDSSNVIRYKKLIVNNSSDFYLVSIAN

SEQ ID NO: 120523 - protein, 27 aa, Artificial Sequence
  Cyclic GFR-binding peptide
DDSSNVIRYKKLYTVVGKDFYLISIAN

SEQ ID NO: 120524 - protein, 27 aa, Artificial Sequence
  Cyclic GFR-binding peptide
DDSSNVIRYKKLIVNSSDDFYLVSIAN

SEQ ID NO: 120525 - protein, 27 aa, Artificial Sequence
  Cyclic GFR-binding peptide
DDSSNVIRYKKLLLVRGNDFYLMSIAN

SEQ ID NO: 120526 - protein, 27 aa, Artificial Sequence
  Cyclic GFR-binding peptide
DDSSNVIQYNKLVVNNASDLYLISIAS

SEQ ID NO: 120527 - protein, 27 aa, Artificial Sequence
  Cyclic GFR-binding peptide
DDSSNVIQYNKLIKPTKGILYLISIAS

SEQ ID NO: 120528 - protein, 27 aa, Artificial Sequence
  Cyclic GFR-binding peptide
DDSSNVIRYKKLVVNKNEDFYLISIAN

SEQ ID NO: 120529 - protein, 27 aa, Artificial Sequence
  Cyclic GFR-binding peptide
DDSSNVIQYNKLYTVVGKDLYLISIAS

SEQ ID NO: 120530 - protein, 27 aa, Artificial Sequence
  Cyclic GFR-binding peptide
DDSSNVIQYNKLVVKDYEDLYLMSIAS

SEQ ID NO: 120531 - protein, 27 aa, Artificial Sequence
  Cyclic GFR-binding peptide
DDSSNVIRYKKLVVNNASDFYLISIAN

SEQ ID NO: 120532 - protein, 27 aa, Artificial Sequence
  Cyclic GFR-binding peptide
DDSSNVIQYNKLIVNSSDDLYLVSIAS

SEQ ID NO: 120533 - protein, 27 aa, Artificial Sequence
  Cyclic GFR-binding peptide
NAISILYFIGKTPKILKKYRDDSSNVI

SEQ ID NO: 120534 - protein, 27 aa, Artificial Sequence
  Cyclic GFR-binding peptide
SAISILYLDENKNVVLKNYQDDSSNVI

SEQ ID NO: 120535 - protein, 27 aa, Artificial Sequence
  Cyclic GFR-binding peptide
SAISILYLDAANNVVLKNYQDDSSNVI

SEQ ID NO: 120536 - protein, 27 aa, Artificial Sequence
  Cyclic GFR-binding peptide
SAISVLYLDSSNNVILKNYQDDSSNVI

SEQ ID NO: 120537 - protein, 27 aa, Artificial Sequence
  Cyclic GFR-binding peptide
NAISMLYFDEYDKVVLKKYRDDSSNVI

SEQ ID NO: 120538 - protein, 27 aa, Artificial Sequence
  Cyclic GFR-binding peptide
NAISILYFVGRTPKVLKKYRDDSSNVI

SEQ ID NO: 120539 - protein, 27 aa, Artificial Sequence
  Cyclic GFR-binding peptide
SAISMLYLNDKQQIILKNYQDDSSNVI

SEQ ID NO: 120540 - protein, 27 aa, Artificial Sequence
  Cyclic GFR-binding peptide
SAISMLYLDNGRVLLLKNYQDDSSNVI

SEQ ID NO: 120541 - protein, 27 aa, Artificial Sequence
  Cyclic GFR-binding peptide
SAISILYLVGRTPKVLKNYQDDSSNVI

SEQ ID NO: 120542 - protein, 27 aa, Artificial Sequence
  Cyclic GFR-binding peptide
NAISMLYFDENEKVVLKKYRDDSSNVI

SEQ ID NO: 120543 - protein, 27 aa, Artificial Sequence
  Cyclic GFR-binding peptide
NAISILYFDAANNVVLKKYRDDSSNVI

SEQ ID NO: 120544 - protein, 27 aa, Artificial Sequence
  Cyclic GFR-binding peptide
SAISVLYLDDMGVPTLKNYQDDSSNVI

SEQ ID NO: 120545 - protein, 27 aa, Artificial Sequence
  Cyclic GFR-binding peptide
NAISVLYFDDMGVPTLKKYRDDSSNVI

SEQ ID NO: 120546 - protein, 27 aa, Artificial Sequence
  Cyclic GFR-binding peptide
NAISILYFVGRKPKVLKKYRDDSSNVI

SEQ ID NO: 120547 - protein, 27 aa, Artificial Sequence
  Cyclic GFR-binding peptide
SAISMLYLDENEKVVLKNYQDDSSNVI

SEQ ID NO: 120548 - protein, 27 aa, Artificial Sequence
  Cyclic GFR-binding peptide
NAISMLYFNDKQQIILKKYRDDSSNVI

SEQ ID NO: 120549 - protein, 27 aa, Artificial Sequence
  Cyclic GFR-binding peptide
SAISILYLVGRKPKVLKNYQDDSSNVI

SEQ ID NO: 120550 - protein, 27 aa, Artificial Sequence
  Cyclic GFR-binding peptide
NAISVLYFDSSNNVILKKYRDDSSNVI

SEQ ID NO: 120551 - protein, 27 aa, Artificial Sequence
  Cyclic GFR-binding peptide
NAISILYFDKGVVTYLKKYRDDSSNVI

SEQ ID NO: 120552 - protein, 27 aa, Artificial Sequence
  Cyclic GFR-binding peptide
NAISVLYFDDSSNVILKKYRDDSSNVI

SEQ ID NO: 120553 - protein, 27 aa, Artificial Sequence
  Cyclic GFR-binding peptide
NAISMLYFDNGRVLLLKKYRDDSSNVI

SEQ ID NO: 120554 - protein, 27 aa, Artificial Sequence
  Cyclic GFR-binding peptide
SAISILYLDSANNVVLKNYQDDSSNVI

SEQ ID NO: 120555 - protein, 27 aa, Artificial Sequence
  Cyclic GFR-binding peptide
SAISILYLIGKTPKILKNYQDDSSNVI

SEQ ID NO: 120556 - protein, 27 aa, Artificial Sequence
  Cyclic GFR-binding peptide
NAISILYFDENKNVVLKKYRDDSSNVI

SEQ ID NO: 120557 - protein, 27 aa, Artificial Sequence
  Cyclic GFR-binding peptide
SAISILYLDKGVVTYLKNYQDDSSNVI

SEQ ID NO: 120558 - protein, 27 aa, Artificial Sequence
  Cyclic GFR-binding peptide
SAISMLYLDEYDKVVLKNYQDDSSNVI

SEQ ID NO: 120559 - protein, 27 aa, Artificial Sequence
  Cyclic GFR-binding peptide
NAISILYFDSANNVVLKKYRDDSSNVI

SEQ ID NO: 120560 - protein, 27 aa, Artificial Sequence
  Cyclic GFR-binding peptide
SAISVLYLDDSSNVILKNYQDDSSNVI

SEQ ID NO: 120561 - protein, 29 aa, Artificial Sequence
  Cyclic GFR-binding peptide
DDSSNVIVTAKKLKPKKRVYEIKRVQVPR

SEQ ID NO: 120562 - protein, 29 aa, Artificial Sequence
  Cyclic GFR-binding peptide
DDSSNVIVQVEKLKPKKRVYEVKAVKVSR

SEQ ID NO: 120563 - protein, 27 aa, Artificial Sequence
  Cyclic GFR-binding peptide
DDSSNVIVTAKKVKPTRGVIKRIQVPR

SEQ ID NO: 120564 - protein, 29 aa, Artificial Sequence
  Cyclic GFR-binding peptide
DDSSNVIVQVEKFIPKKRVIEVKAVKVSR

SEQ ID NO: 120565 - protein, 29 aa, Artificial Sequence
  Cyclic GFR-binding peptide
DDSSNVIVQVEKHQGQHPKIRVKAMKVSR

SEQ ID NO: 120566 - protein, 29 aa, Artificial Sequence
  Cyclic GFR-binding peptide
DDSSNVIVTAKKHQGQHPKIRIKRMQVPR

SEQ ID NO: 120567 - protein, 27 aa, Artificial Sequence
  Cyclic GFR-binding peptide
DDSSNVIVTAKKIKPTKGIIKRIQVPR

SEQ ID NO: 120568 - protein, 27 aa, Artificial Sequence
  Cyclic GFR-binding peptide
DDSSNVIVQVEKVKPKRGVVKAIKVSR

SEQ ID NO: 120569 - protein, 27 aa, Artificial Sequence
  Cyclic GFR-binding peptide
DDSSNVIVTAKKVKPKRGVIKRIQVPR

SEQ ID NO: 120570 - protein, 27 aa, Artificial Sequence
  Cyclic GFR-binding peptide
DDSSNVIVQVEKIKPTKGIVKAIKVSR

SEQ ID NO: 120571 - protein, 27 aa, Artificial Sequence
  Cyclic GFR-binding peptide
DDSSNVIVQVEKVKPTRGVVKAIKVSR

SEQ ID NO: 120572 - protein, 29 aa, Artificial Sequence
  Cyclic GFR-binding peptide
DDSSNVIVTAKKFIPKKRVIEIKRVQVPR

SEQ ID NO: 120573 - protein, 29 aa, Artificial Sequence
  Cyclic GFR-binding peptide
RPVQVRKIEYVRKKPKLKKATVDDSSNVI

SEQ ID NO: 120574 - protein, 29 aa, Artificial Sequence
  Cyclic GFR-binding peptide
RSVKVAKVEYVRKKPKLKEVQVDDSSNVI

SEQ ID NO: 120575 - protein, 27 aa, Artificial Sequence
  Cyclic GFR-binding peptide
RPVQIRKIVGRTPKVKKATVDDSSNVI

SEQ ID NO: 120576 - protein, 29 aa, Artificial Sequence
  Cyclic GFR-binding peptide
RSVKVAKVEIVRKKPIFKEVQVDDSSNVI

SEQ ID NO: 120577 - protein, 29 aa, Artificial Sequence
  Cyclic GFR-binding peptide
RSVKMAKVRIKPHQGQHKEVQVDDSSNVI

SEQ ID NO: 120578 - protein, 29 aa, Artificial Sequence
  Cyclic GFR-binding peptide
RPVQMRKIRIKPHQGQHKKATVDDSSNVI

SEQ ID NO: 120579 - protein, 27 aa, Artificial Sequence
  Cyclic GFR-binding peptide
RPVQIRKIIGKTPKIKKATVDDSSNVI

SEQ ID NO: 120580 - protein, 27 aa, Artificial Sequence
  Cyclic GFR-binding peptide
RSVKIAKVVGRKPKVKEVQVDDSSNVI

SEQ ID NO: 120581 - protein, 27 aa, Artificial Sequence
  Cyclic GFR-binding peptide
RPVQIRKIVGRKPKVKKATVDDSSNVI

SEQ ID NO: 120582 - protein, 27 aa, Artificial Sequence
  Cyclic GFR-binding peptide
RSVKIAKVIGKTPKIKEVQVDDSSNVI

SEQ ID NO: 120583 - protein, 27 aa, Artificial Sequence
  Cyclic GFR-binding peptide
RSVKIAKVVGRTPKVKEVQVDDSSNVI

SEQ ID NO: 120584 - protein, 29 aa, Artificial Sequence
  Cyclic GFR-binding peptide
RPVQVRKIEIVRKKPIFKKATVDDSSNVI

SEQ ID NO: 120585 - protein, 27 aa, Artificial Sequence
  Cyclic GFR-binding peptide
DSSNNVIRYKKLIKPTKGIFYLISIAN

SEQ ID NO: 120586 - protein, 29 aa, Artificial Sequence
  Cyclic GFR-binding peptide
DSSNNVIRHKRLFIPKKRVIEYYLVSTAS

SEQ ID NO: 120587 - protein, 27 aa, Artificial Sequence
  Cyclic GFR-binding peptide
DSSNNVIYHYKLVVKDYEDKYLMSIPS

SEQ ID NO: 120588 - protein, 27 aa, Artificial Sequence
  Cyclic GFR-binding peptide
DSSNNVIQYNKLIVNNSSDLYLVSIAS

SEQ ID NO: 120589 - protein, 27 aa, Artificial Sequence
  Cyclic GFR-binding peptide
DSSNNVIRYKKLVVKDYEDFYLMSIAN

SEQ ID NO: 120590 - protein, 27 aa, Artificial Sequence
  Cyclic GFR-binding peptide
DSSNNVIRYKKLVKPTRGVFYLISIAN

SEQ ID NO: 120591 - protein, 27 aa, Artificial Sequence
  Cyclic GFR-binding peptide
DSSNNVIRHKRLVVKENEDYYLMSTAS

SEQ ID NO: 120592 - protein, 27 aa, Artificial Sequence
  Cyclic GFR-binding peptide
DSSNNVIYHYKLIKPTKGIKYLISIPS

SEQ ID NO: 120593 - protein, 29 aa, Artificial Sequence
  Cyclic GFR-binding peptide
DSSNNVIRYKKLFIPKKRVIEFYLVSIAN

SEQ ID NO: 120594 - protein, 27 aa, Artificial Sequence
  Cyclic GFR-binding peptide
DSSNNVIYHYKLVVKENEDKYLMSIPS

SEQ ID NO: 120595 - protein, 27 aa, Artificial Sequence
  Cyclic GFR-binding peptide
DSSNNVIRHKRLVKPKRGVYYLISTAS

SEQ ID NO: 120596 - protein, 27 aa, Artificial Sequence
  Cyclic GFR-binding peptide
DSSNNVIYHYKLVKPKRGVKYLISIPS

SEQ ID NO: 120597 - protein, 29 aa, Artificial Sequence
  Cyclic GFR-binding peptide
DSSNNVIQYNKLFIPKKRVIELYLVSIAS

SEQ ID NO: 120598 - protein, 27 aa, Artificial Sequence
  Cyclic GFR-binding peptide
DSSNNVIQYNKLVKPTRGVLYLISIAS

SEQ ID NO: 120599 - protein, 27 aa, Artificial Sequence
  Cyclic GFR-binding peptide
DSSNNVIRYKKLVVKENEDFYLMSIAN

SEQ ID NO: 120600 - protein, 27 aa, Artificial Sequence
  Cyclic GFR-binding peptide
DSSNNVIQYNKLTPVGMDDLYLVSIAS

SEQ ID NO: 120601 - protein, 27 aa, Artificial Sequence
  Cyclic GFR-binding peptide
DSSNNVIRYKKLTPVGMDDFYLVSIAN

SEQ ID NO: 120602 - protein, 27 aa, Artificial Sequence
  Cyclic GFR-binding peptide
DSSNNVIRYKKLVKPKRGVFYLISIAN

SEQ ID NO: 120603 - protein, 27 aa, Artificial Sequence
  Cyclic GFR-binding peptide
DSSNNVIQYNKLVVKENEDLYLMSIAS

SEQ ID NO: 120604 - protein, 27 aa, Artificial Sequence
  Cyclic GFR-binding peptide
DSSNNVIYHYKLIVNSSDDKYLVSIPS

SEQ ID NO: 120605 - protein, 27 aa, Artificial Sequence
  Cyclic GFR-binding peptide
DSSNNVIQYNKLVKPKRGVLYLISIAS

SEQ ID NO: 120606 - protein, 27 aa, Artificial Sequence
  Cyclic GFR-binding peptide
DSSNNVIRYKKLIVNNSSDFYLVSIAN

SEQ ID NO: 120607 - protein, 27 aa, Artificial Sequence
  Cyclic GFR-binding peptide
DSSNNVIRYKKLIVNSSDDFYLVSIAN

SEQ ID NO: 120608 - protein, 27 aa, Artificial Sequence
  Cyclic GFR-binding peptide
DSSNNVIRHKRLVKPTRGVYYLISTAS

SEQ ID NO: 120609 - protein, 29 aa, Artificial Sequence
  Cyclic GFR-binding peptide
DSSNNVIYHYKLFIPKKRVIEKYLVSIPS

SEQ ID NO: 120610 - protein, 27 aa, Artificial Sequence
  Cyclic GFR-binding peptide
DSSNNVIRHKRLIKPTKGIYYLISTAS

SEQ ID NO: 120611 - protein, 27 aa, Artificial Sequence
  Cyclic GFR-binding peptide
DSSNNVIRHKRLTPVGMDDYYLVSTAS

SEQ ID NO: 120612 - protein, 27 aa, Artificial Sequence
  Cyclic GFR-binding peptide
DSSNNVIYHYKLTPVGMDDKYLVSIPS

SEQ ID NO: 120613 - protein, 27 aa, Artificial Sequence
  Cyclic GFR-binding peptide
DSSNNVIYHYKLIVNNSSDKYLVSIPS

SEQ ID NO: 120614 - protein, 27 aa, Artificial Sequence
  Cyclic GFR-binding peptide
DSSNNVIRHKRLIVNNSSDYYLVSTAS

SEQ ID NO: 120615 - protein, 27 aa, Artificial Sequence
  Cyclic GFR-binding peptide
DSSNNVIYHYKLVKPTRGVKYLISIPS

SEQ ID NO: 120616 - protein, 27 aa, Artificial Sequence
  Cyclic GFR-binding peptide
DSSNNVIRHKRLIVNSSDDYYLVSTAS

SEQ ID NO: 120617 - protein, 27 aa, Artificial Sequence
  Cyclic GFR-binding peptide
DSSNNVIRHKRLVVKDYEDYYLMSTAS

SEQ ID NO: 120618 - protein, 27 aa, Artificial Sequence
  Cyclic GFR-binding peptide
DSSNNVIQYNKLIKPTKGILYLISIAS

SEQ ID NO: 120619 - protein, 27 aa, Artificial Sequence
  Cyclic GFR-binding peptide
DSSNNVIQYNKLVVKDYEDLYLMSIAS

SEQ ID NO: 120620 - protein, 27 aa, Artificial Sequence
  Cyclic GFR-binding peptide
DSSNNVIQYNKLIVNSSDDLYLVSIAS

SEQ ID NO: 120621 - protein, 27 aa, Artificial Sequence
  Cyclic GFR-binding peptide
NAISILYFIGKTPKILKKYRDSSNNVI

SEQ ID NO: 120622 - protein, 29 aa, Artificial Sequence
  Cyclic GFR-binding peptide
SATSVLYYEIVRKKPIFLRKHRDSSNNVI

SEQ ID NO: 120623 - protein, 27 aa, Artificial Sequence
  Cyclic GFR-binding peptide
SPISMLYKDEYDKVVLKYHYDSSNNVI

SEQ ID NO: 120624 - protein, 27 aa, Artificial Sequence
  Cyclic GFR-binding peptide
SAISVLYLDSSNNVILKNYQDSSNNVI

SEQ ID NO: 120625 - protein, 27 aa, Artificial Sequence
  Cyclic GFR-binding peptide
NAISMLYFDEYDKVVLKKYRDSSNNVI

SEQ ID NO: 120626 - protein, 27 aa, Artificial Sequence
  Cyclic GFR-binding peptide
NAISILYFVGRTPKVLKKYRDSSNNVI

SEQ ID NO: 120627 - protein, 27 aa, Artificial Sequence
  Cyclic GFR-binding peptide
SATSMLYYDENEKVVLRKHRDSSNNVI

SEQ ID NO: 120628 - protein, 27 aa, Artificial Sequence
  Cyclic GFR-binding peptide
SPISILYKIGKTPKILKYHYDSSNNVI

SEQ ID NO: 120629 - protein, 29 aa, Artificial Sequence
  Cyclic GFR-binding peptide
NAISVLYFEIVRKKPIFLKKYRDSSNNVI

SEQ ID NO: 120630 - protein, 27 aa, Artificial Sequence
  Cyclic GFR-binding peptide
SPISMLYKDENEKVVLKYHYDSSNNVI

SEQ ID NO: 120631 - protein, 27 aa, Artificial Sequence
  Cyclic GFR-binding peptide
SATSILYYVGRKPKVLRKHRDSSNNVI

SEQ ID NO: 120632 - protein, 27 aa, Artificial Sequence
  Cyclic GFR-binding peptide
SPISILYKVGRKPKVLKYHYDSSNNVI

SEQ ID NO: 120633 - protein, 29 aa, Artificial Sequence
  Cyclic GFR-binding peptide
SAISVLYLEIVRKKPIFLKNYQDSSNNVI

SEQ ID NO: 120634 - protein, 27 aa, Artificial Sequence
  Cyclic GFR-binding peptide
SAISILYLVGRTPKVLKNYQDSSNNVI

SEQ ID NO: 120635 - protein, 27 aa, Artificial Sequence
  Cyclic GFR-binding peptide
NAISMLYFDENEKVVLKKYRDSSNNVI

SEQ ID NO: 120636 - protein, 27 aa, Artificial Sequence
  Cyclic GFR-binding peptide
SAISVLYLDDMGVPTLKNYQDSSNNVI

SEQ ID NO: 120637 - protein, 27 aa, Artificial Sequence
  Cyclic GFR-binding peptide
NAISVLYFDDMGVPTLKKYRDSSNNVI

SEQ ID NO: 120638 - protein, 27 aa, Artificial Sequence
  Cyclic GFR-binding peptide
NAISILYFVGRKPKVLKKYRDSSNNVI

SEQ ID NO: 120639 - protein, 27 aa, Artificial Sequence
  Cyclic GFR-binding peptide
SAISMLYLDENEKVVLKNYQDSSNNVI

SEQ ID NO: 120640 - protein, 27 aa, Artificial Sequence
  Cyclic GFR-binding peptide
SPISVLYKDDSSNVILKYHYDSSNNVI

SEQ ID NO: 120641 - protein, 27 aa, Artificial Sequence
  Cyclic GFR-binding peptide
SAISILYLVGRKPKVLKNYQDSSNNVI

SEQ ID NO: 120642 - protein, 27 aa, Artificial Sequence
  Cyclic GFR-binding peptide
NAISVLYFDSSNNVILKKYRDSSNNVI

SEQ ID NO: 120643 - protein, 27 aa, Artificial Sequence
  Cyclic GFR-binding peptide
NAISVLYFDDSSNVILKKYRDSSNNVI

SEQ ID NO: 120644 - protein, 27 aa, Artificial Sequence
  Cyclic GFR-binding peptide
SATSILYYVGRTPKVLRKHRDSSNNVI

SEQ ID NO: 120645 - protein, 29 aa, Artificial Sequence
  Cyclic GFR-binding peptide
SPISVLYKEIVRKKPIFLKYHYDSSNNVI

SEQ ID NO: 120646 - protein, 27 aa, Artificial Sequence
  Cyclic GFR-binding peptide
SATSILYYIGKTPKILRKHRDSSNNVI

SEQ ID NO: 120647 - protein, 27 aa, Artificial Sequence
  Cyclic GFR-binding peptide
SATSVLYYDDMGVPTLRKHRDSSNNVI

SEQ ID NO: 120648 - protein, 27 aa, Artificial Sequence
  Cyclic GFR-binding peptide
SPISVLYKDDMGVPTLKYHYDSSNNVI

SEQ ID NO: 120649 - protein, 27 aa, Artificial Sequence
  Cyclic GFR-binding peptide
SPISVLYKDSSNNVILKYHYDSSNNVI

SEQ ID NO: 120650 - protein, 27 aa, Artificial Sequence
  Cyclic GFR-binding peptide
SATSVLYYDSSNNVILRKHRDSSNNVI

SEQ ID NO: 120651 - protein, 27 aa, Artificial Sequence
  Cyclic GFR-binding peptide
SPISILYKVGRTPKVLKYHYDSSNNVI

SEQ ID NO: 120652 - protein, 27 aa, Artificial Sequence
  Cyclic GFR-binding peptide
SATSVLYYDDSSNVILRKHRDSSNNVI

SEQ ID NO: 120653 - protein, 27 aa, Artificial Sequence
  Cyclic GFR-binding peptide
SATSMLYYDEYDKVVLRKHRDSSNNVI

SEQ ID NO: 120654 - protein, 27 aa, Artificial Sequence
  Cyclic GFR-binding peptide
SAISILYLIGKTPKILKNYQDSSNNVI

SEQ ID NO: 120655 - protein, 27 aa, Artificial Sequence
  Cyclic GFR-binding peptide
SAISMLYLDEYDKVVLKNYQDSSNNVI

SEQ ID NO: 120656 - protein, 27 aa, Artificial Sequence
  Cyclic GFR-binding peptide
SAISVLYLDDSSNVILKNYQDSSNNVI

SEQ ID NO: 120657 - protein, 27 aa, Artificial Sequence
  Cyclic GFR-binding peptide
DSSNNVIRYKKLIKPTKGIFYLISIAN

SEQ ID NO: 120658 - protein, 27 aa, Artificial Sequence
  Cyclic GFR-binding peptide
DSSNNVINSLQEVVKDYEDYYLMTLPE

SEQ ID NO: 120659 - protein, 27 aa, Artificial Sequence
  Cyclic GFR-binding peptide
DSSNNVINSLQEIKPTKGIYYVIPLPE

SEQ ID NO: 120660 - protein, 27 aa, Artificial Sequence
  Cyclic GFR-binding peptide
DSSNNVINSLQEVKPKRGVYYLITLPE

SEQ ID NO: 120661 - protein, 27 aa, Artificial Sequence
  Cyclic GFR-binding peptide
DSSNNVINSLQEVKPTRGVYYVIPLPE

SEQ ID NO: 120662 - protein, 27 aa, Artificial Sequence
  Cyclic GFR-binding peptide
DSSNNVIRYKKLVVKDYEDFYLMSIAN

SEQ ID NO: 120663 - protein, 27 aa, Artificial Sequence
  Cyclic GFR-binding peptide
DSSNNVIEYQKYIVNSSDDIFLVSIPS

SEQ ID NO: 120664 - protein, 27 aa, Artificial Sequence
  Cyclic GFR-binding peptide
DSSNNVIEYQKYVKPTRGVIFLISIPS

SEQ ID NO: 120665 - protein, 27 aa, Artificial Sequence
  Cyclic GFR-binding peptide
DSSNNVINSLQEVVKENEDYYLMTLPE

SEQ ID NO: 120666 - protein, 27 aa, Artificial Sequence
  Cyclic GFR-binding peptide
DSSNNVIRYKKLVKPTRGVFYLISIAN

SEQ ID NO: 120667 - protein, 27 aa, Artificial Sequence
  Cyclic GFR-binding peptide
DSSNNVINSLQEVVNNASDYYLITLPE

SEQ ID NO: 120668 - protein, 27 aa, Artificial Sequence
  Cyclic GFR-binding peptide
DSSNNVINSLQEVKPKRGVYYVIPLPE

SEQ ID NO: 120669 - protein, 27 aa, Artificial Sequence
  Cyclic GFR-binding peptide
DSSNNVINSLQEVVNNASDYYVIPLPE

SEQ ID NO: 120670 - protein, 27 aa, Artificial Sequence
  Cyclic GFR-binding peptide
DSSNNVINSLQEVKPTRGVYYLITLPE

SEQ ID NO: 120671 - protein, 27 aa, Artificial Sequence
  Cyclic GFR-binding peptide
DSSNNVIQYNKLVKPTRGVLYLISIAS

SEQ ID NO: 120672 - protein, 27 aa, Artificial Sequence
  Cyclic GFR-binding peptide
DSSNNVIRYKKLVVKENEDFYLMSIAN

SEQ ID NO: 120673 - protein, 27 aa, Artificial Sequence
  Cyclic GFR-binding peptide
DSSNNVIEYQKYIKPTKGIIFLISIPS

SEQ ID NO: 120674 - protein, 27 aa, Artificial Sequence
  Cyclic GFR-binding peptide
DSSNNVIEYQKYVVNNASDIFLISIPS

SEQ ID NO: 120675 - protein, 27 aa, Artificial Sequence
  Cyclic GFR-binding peptide
DSSNNVIRYKKLVKPKRGVFYLISIAN

SEQ ID NO: 120676 - protein, 27 aa, Artificial Sequence
  Cyclic GFR-binding peptide
DSSNNVINSLQEIVNSSDDYYVVPLPE

SEQ ID NO: 120677 - protein, 27 aa, Artificial Sequence
  Cyclic GFR-binding peptide
DSSNNVINSLQEVVKDYEDYYVMPLPE

SEQ ID NO: 120678 - protein, 27 aa, Artificial Sequence
  Cyclic GFR-binding peptide
DSSNNVIQYNKLVVKENEDLYLMSIAS

SEQ ID NO: 120679 - protein, 27 aa, Artificial Sequence
  Cyclic GFR-binding peptide
DSSNNVIEYQKYVVKENEDIFLMSIPS

SEQ ID NO: 120680 - protein, 27 aa, Artificial Sequence
  Cyclic GFR-binding peptide
DSSNNVIQYNKLVKPKRGVLYLISIAS

SEQ ID NO: 120681 - protein, 27 aa, Artificial Sequence
  Cyclic GFR-binding peptide
DSSNNVIRYKKLIVNSSDDFYLVSIAN

SEQ ID NO: 120682 - protein, 27 aa, Artificial Sequence
  Cyclic GFR-binding peptide
DSSNNVINSLQEVVKENEDYYVMPLPE

SEQ ID NO: 120683 - protein, 27 aa, Artificial Sequence
  Cyclic GFR-binding peptide
DSSNNVIEYQKYVVKDYEDIFLMSIPS

SEQ ID NO: 120684 - protein, 27 aa, Artificial Sequence
  Cyclic GFR-binding peptide
DSSNNVIQYNKLVVNNASDLYLISIAS

SEQ ID NO: 120685 - protein, 27 aa, Artificial Sequence
  Cyclic GFR-binding peptide
DSSNNVIQYNKLIKPTKGILYLISIAS

SEQ ID NO: 120686 - protein, 27 aa, Artificial Sequence
  Cyclic GFR-binding peptide
DSSNNVINSLQEIKPTKGIYYLITLPE

SEQ ID NO: 120687 - protein, 27 aa, Artificial Sequence
  Cyclic GFR-binding peptide
DSSNNVIEYQKYVKPKRGVIFLISIPS

SEQ ID NO: 120688 - protein, 27 aa, Artificial Sequence
  Cyclic GFR-binding peptide
DSSNNVIQYNKLVVKDYEDLYLMSIAS

SEQ ID NO: 120689 - protein, 27 aa, Artificial Sequence
  Cyclic GFR-binding peptide
DSSNNVIRYKKLVVNNASDFYLISIAN

SEQ ID NO: 120690 - protein, 27 aa, Artificial Sequence
  Cyclic GFR-binding peptide
DSSNNVINSLQEIVNSSDDYYLVTLPE

SEQ ID NO: 120691 - protein, 27 aa, Artificial Sequence
  Cyclic GFR-binding peptide
DSSNNVIQYNKLIVNSSDDLYLVSIAS

SEQ ID NO: 120692 - protein, 27 aa, Artificial Sequence
  Cyclic GFR-binding peptide
NAISILYFIGKTPKILKKYRDSSNNVI

SEQ ID NO: 120693 - protein, 27 aa, Artificial Sequence
  Cyclic GFR-binding peptide
EPLTMLYYDEYDKVVEQLSNDSSNNVI

SEQ ID NO: 120694 - protein, 27 aa, Artificial Sequence
  Cyclic GFR-binding peptide
EPLPIVYYIGKTPKIEQLSNDSSNNVI

SEQ ID NO: 120695 - protein, 27 aa, Artificial Sequence
  Cyclic GFR-binding peptide
EPLTILYYVGRKPKVEQLSNDSSNNVI

SEQ ID NO: 120696 - protein, 27 aa, Artificial Sequence
  Cyclic GFR-binding peptide
EPLPIVYYVGRTPKVEQLSNDSSNNVI

SEQ ID NO: 120697 - protein, 27 aa, Artificial Sequence
  Cyclic GFR-binding peptide
NAISMLYFDEYDKVVLKKYRDSSNNVI

SEQ ID NO: 120698 - protein, 27 aa, Artificial Sequence
  Cyclic GFR-binding peptide
SPISVLFIDDSSNVIYKQYEDSSNNVI

SEQ ID NO: 120699 - protein, 27 aa, Artificial Sequence
  Cyclic GFR-binding peptide
SPISILFIVGRTPKVYKQYEDSSNNVI

SEQ ID NO: 120700 - protein, 27 aa, Artificial Sequence
  Cyclic GFR-binding peptide
EPLTMLYYDENEKVVEQLSNDSSNNVI

SEQ ID NO: 120701 - protein, 27 aa, Artificial Sequence
  Cyclic GFR-binding peptide
NAISILYFVGRTPKVLKKYRDSSNNVI

SEQ ID NO: 120702 - protein, 27 aa, Artificial Sequence
  Cyclic GFR-binding peptide
EPLTILYYDSANNVVEQLSNDSSNNVI

SEQ ID NO: 120703 - protein, 27 aa, Artificial Sequence
  Cyclic GFR-binding peptide
EPLPIVYYVGRKPKVEQLSNDSSNNVI

SEQ ID NO: 120704 - protein, 27 aa, Artificial Sequence
  Cyclic GFR-binding peptide
EPLPIVYYDSANNVVEQLSNDSSNNVI

SEQ ID NO: 120705 - protein, 27 aa, Artificial Sequence
  Cyclic GFR-binding peptide
EPLTILYYVGRTPKVEQLSNDSSNNVI

SEQ ID NO: 120706 - protein, 27 aa, Artificial Sequence
  Cyclic GFR-binding peptide
SAISILYLVGRTPKVLKNYQDSSNNVI

SEQ ID NO: 120707 - protein, 27 aa, Artificial Sequence
  Cyclic GFR-binding peptide
NAISMLYFDENEKVVLKKYRDSSNNVI

SEQ ID NO: 120708 - protein, 27 aa, Artificial Sequence
  Cyclic GFR-binding peptide
SPISILFIIGKTPKIYKQYEDSSNNVI

SEQ ID NO: 120709 - protein, 27 aa, Artificial Sequence
  Cyclic GFR-binding peptide
SPISILFIDSANNVVYKQYEDSSNNVI

SEQ ID NO: 120710 - protein, 27 aa, Artificial Sequence
  Cyclic GFR-binding peptide
NAISILYFVGRKPKVLKKYRDSSNNVI

SEQ ID NO: 120711 - protein, 27 aa, Artificial Sequence
  Cyclic GFR-binding peptide
EPLPVVYYDDSSNVIEQLSNDSSNNVI

SEQ ID NO: 120712 - protein, 27 aa, Artificial Sequence
  Cyclic GFR-binding peptide
EPLPMVYYDEYDKVVEQLSNDSSNNVI

SEQ ID NO: 120713 - protein, 27 aa, Artificial Sequence
  Cyclic GFR-binding peptide
SAISMLYLDENEKVVLKNYQDSSNNVI

SEQ ID NO: 120714 - protein, 27 aa, Artificial Sequence
  Cyclic GFR-binding peptide
SPISMLFIDENEKVVYKQYEDSSNNVI

SEQ ID NO: 120715 - protein, 27 aa, Artificial Sequence
  Cyclic GFR-binding peptide
SAISILYLVGRKPKVLKNYQDSSNNVI

SEQ ID NO: 120716 - protein, 27 aa, Artificial Sequence
  Cyclic GFR-binding peptide
NAISVLYFDDSSNVILKKYRDSSNNVI

SEQ ID NO: 120717 - protein, 27 aa, Artificial Sequence
  Cyclic GFR-binding peptide
EPLPMVYYDENEKVVEQLSNDSSNNVI

SEQ ID NO: 120718 - protein, 27 aa, Artificial Sequence
  Cyclic GFR-binding peptide
SPISMLFIDEYDKVVYKQYEDSSNNVI

SEQ ID NO: 120719 - protein, 27 aa, Artificial Sequence
  Cyclic GFR-binding peptide
SAISILYLDSANNVVLKNYQDSSNNVI

SEQ ID NO: 120720 - protein, 27 aa, Artificial Sequence
  Cyclic GFR-binding peptide
SAISILYLIGKTPKILKNYQDSSNNVI

SEQ ID NO: 120721 - protein, 27 aa, Artificial Sequence
  Cyclic GFR-binding peptide
EPLTILYYIGKTPKIEQLSNDSSNNVI

SEQ ID NO: 120722 - protein, 27 aa, Artificial Sequence
  Cyclic GFR-binding peptide
SPISILFIVGRKPKVYKQYEDSSNNVI

SEQ ID NO: 120723 - protein, 27 aa, Artificial Sequence
  Cyclic GFR-binding peptide
SAISMLYLDEYDKVVLKNYQDSSNNVI

SEQ ID NO: 120724 - protein, 27 aa, Artificial Sequence
  Cyclic GFR-binding peptide
NAISILYFDSANNVVLKKYRDSSNNVI

SEQ ID NO: 120725 - protein, 27 aa, Artificial Sequence
  Cyclic GFR-binding peptide
EPLTVLYYDDSSNVIEQLSNDSSNNVI

SEQ ID NO: 120726 - protein, 27 aa, Artificial Sequence
  Cyclic GFR-binding peptide
SAISVLYLDDSSNVILKNYQDSSNNVI

SEQ ID NO: 120727 - protein, 29 aa, Artificial Sequence
  Cyclic GFR-binding peptide
DSSNNVIVTAKKLKPKKRVYEIKRVQVPR

SEQ ID NO: 120728 - protein, 29 aa, Artificial Sequence
  Cyclic GFR-binding peptide
DSSNNVIVQVEKLKPKKRVYEVKAVKVSR

SEQ ID NO: 120729 - protein, 29 aa, Artificial Sequence
  Cyclic GFR-binding peptide
DSSNNVIVQVEKFIPKKRVIEVKAVKVSR

SEQ ID NO: 120730 - protein, 29 aa, Artificial Sequence
  Cyclic GFR-binding peptide
DSSNNVIVQVEKHQGQHPKIRVKAMKVSR

SEQ ID NO: 120731 - protein, 29 aa, Artificial Sequence
  Cyclic GFR-binding peptide
DSSNNVIVTAKKHQGQHPKIRIKRMQVPR

SEQ ID NO: 120732 - protein, 29 aa, Artificial Sequence
  Cyclic GFR-binding peptide
DSSNNVISMEGLLKPKKRVYEMIQVTINS

SEQ ID NO: 120733 - protein, 29 aa, Artificial Sequence
  Cyclic GFR-binding peptide
DSSNNVISMEGIFIPKKRVIEMIQVTINS

SEQ ID NO: 120734 - protein, 29 aa, Artificial Sequence
  Cyclic GFR-binding peptide
DSSNNVISMEGLHQGQHPKIRMIQMTINS

SEQ ID NO: 120735 - protein, 29 aa, Artificial Sequence
  Cyclic GFR-binding peptide
DSSNNVISMEGILKPKKRVYEMIQVTINS

SEQ ID NO: 120736 - protein, 29 aa, Artificial Sequence
  Cyclic GFR-binding peptide
DSSNNVISMEGLFIPKKRVIEMIQVTINS

SEQ ID NO: 120737 - protein, 29 aa, Artificial Sequence
  Cyclic GFR-binding peptide
DSSNNVIVTAKKFIPKKRVIEIKRVQVPR

SEQ ID NO: 120738 - protein, 29 aa, Artificial Sequence
  Cyclic GFR-binding peptide
DSSNNVISMEGIHQGQHPKIRMIQMTINS

SEQ ID NO: 120739 - protein, 29 aa, Artificial Sequence
  Cyclic GFR-binding peptide
RPVQVRKIEYVRKKPKLKKATVDSSNNVI

SEQ ID NO: 120740 - protein, 29 aa, Artificial Sequence
  Cyclic GFR-binding peptide
RSVKVAKVEYVRKKPKLKEVQVDSSNNVI

SEQ ID NO: 120741 - protein, 29 aa, Artificial Sequence
  Cyclic GFR-binding peptide
RSVKVAKVEIVRKKPIFKEVQVDSSNNVI

SEQ ID NO: 120742 - protein, 29 aa, Artificial Sequence
  Cyclic GFR-binding peptide
RSVKMAKVRIKPHQGQHKEVQVDSSNNVI

SEQ ID NO: 120743 - protein, 29 aa, Artificial Sequence
  Cyclic GFR-binding peptide
RPVQMRKIRIKPHQGQHKKATVDSSNNVI

SEQ ID NO: 120744 - protein, 29 aa, Artificial Sequence
  Cyclic GFR-binding peptide
SNITVQIMEYVRKKPKLLGEMSDSSNNVI

SEQ ID NO: 120745 - protein, 29 aa, Artificial Sequence
  Cyclic GFR-binding peptide
SNITVQIMEIVRKKPIFIGEMSDSSNNVI

SEQ ID NO: 120746 - protein, 29 aa, Artificial Sequence
  Cyclic GFR-binding peptide
SNITMQIMRIKPHQGQHLGEMSDSSNNVI

SEQ ID NO: 120747 - protein, 29 aa, Artificial Sequence
  Cyclic GFR-binding peptide
SNITVQIMEYVRKKPKLIGEMSDSSNNVI

SEQ ID NO: 120748 - protein, 29 aa, Artificial Sequence
  Cyclic GFR-binding peptide
SNITVQIMEIVRKKPIFLGEMSDSSNNVI

SEQ ID NO: 120749 - protein, 29 aa, Artificial Sequence
  Cyclic GFR-binding peptide
RPVQVRKIEIVRKKPIFKKATVDSSNNVI

SEQ ID NO: 120750 - protein, 29 aa, Artificial Sequence
  Cyclic GFR-binding peptide
SNITMQIMRIKPHQGQHIGEMSDSSNNVI

SEQ ID NO: 120751 - protein, 29 aa, Artificial Sequence
  Cyclic GFR-binding peptide
DSSNNVIVTAKKLKPKKRVYEIKRVQVPR

SEQ ID NO: 120752 - protein, 29 aa, Artificial Sequence
  Cyclic GFR-binding peptide
DSSNNVIVQVEKLKPKKRVYEVKAVKVSR

SEQ ID NO: 120753 - protein, 29 aa, Artificial Sequence
  Cyclic GFR-binding peptide
DSSNNVIVQVEKFIPKKRVIEVKAVKVSR

SEQ ID NO: 120754 - protein, 29 aa, Artificial Sequence
  Cyclic GFR-binding peptide
DSSNNVIVQVEKHQGQHPKIRVKAMKVSR

SEQ ID NO: 120755 - protein, 29 aa, Artificial Sequence
  Cyclic GFR-binding peptide
DSSNNVIVTAKKHQGQHPKIRIKRMQVPR

SEQ ID NO: 120756 - protein, 29 aa, Artificial Sequence
  Cyclic GFR-binding peptide
DSSNNVISMEGLLKPKKRVYEMIQVTINS

SEQ ID NO: 120757 - protein, 29 aa, Artificial Sequence
  Cyclic GFR-binding peptide
DSSNNVISMEGIFIPKKRVIEMIQVTINS

SEQ ID NO: 120758 - protein, 29 aa, Artificial Sequence
  Cyclic GFR-binding peptide
DSSNNVISMEGLHQGQHPKIRMIQMTINS

SEQ ID NO: 120759 - protein, 29 aa, Artificial Sequence
  Cyclic GFR-binding peptide
DSSNNVISMEGILKPKKRVYEMIQVTINS

SEQ ID NO: 120760 - protein, 29 aa, Artificial Sequence
  Cyclic GFR-binding peptide
DSSNNVISMEGLFIPKKRVIEMIQVTINS

SEQ ID NO: 120761 - protein, 29 aa, Artificial Sequence
  Cyclic GFR-binding peptide
DSSNNVIVTAKKFIPKKRVIEIKRVQVPR

SEQ ID NO: 120762 - protein, 29 aa, Artificial Sequence
  Cyclic GFR-binding peptide
DSSNNVISMEGIHQGQHPKIRMIQMTINS

SEQ ID NO: 120763 - protein, 29 aa, Artificial Sequence
  Cyclic GFR-binding peptide
RPVQVRKIEYVRKKPKLKKATVDSSNNVI

SEQ ID NO: 120764 - protein, 29 aa, Artificial Sequence
  Cyclic GFR-binding peptide
RSVKVAKVEYVRKKPKLKEVQVDSSNNVI

SEQ ID NO: 120765 - protein, 29 aa, Artificial Sequence
  Cyclic GFR-binding peptide
RSVKVAKVEIVRKKPIFKEVQVDSSNNVI

SEQ ID NO: 120766 - protein, 29 aa, Artificial Sequence
  Cyclic GFR-binding peptide
RSVKMAKVRIKPHQGQHKEVQVDSSNNVI

SEQ ID NO: 120767 - protein, 29 aa, Artificial Sequence
  Cyclic GFR-binding peptide
RPVQMRKIRIKPHQGQHKKATVDSSNNVI

SEQ ID NO: 120768 - protein, 29 aa, Artificial Sequence
  Cyclic GFR-binding peptide
SNITVQIMEYVRKKPKLLGEMSDSSNNVI

SEQ ID NO: 120769 - protein, 29 aa, Artificial Sequence
  Cyclic GFR-binding peptide
SNITVQIMEIVRKKPIFIGEMSDSSNNVI

SEQ ID NO: 120770 - protein, 29 aa, Artificial Sequence
  Cyclic GFR-binding peptide
SNITMQIMRIKPHQGQHLGEMSDSSNNVI

SEQ ID NO: 120771 - protein, 29 aa, Artificial Sequence
  Cyclic GFR-binding peptide
SNITVQIMEYVRKKPKLIGEMSDSSNNVI

SEQ ID NO: 120772 - protein, 29 aa, Artificial Sequence
  Cyclic GFR-binding peptide
SNITVQIMEIVRKKPIFLGEMSDSSNNVI

SEQ ID NO: 120773 - protein, 29 aa, Artificial Sequence
  Cyclic GFR-binding peptide
RPVQVRKIEIVRKKPIFKKATVDSSNNVI

SEQ ID NO: 120774 - protein, 29 aa, Artificial Sequence
  Cyclic GFR-binding peptide
SNITMQIMRIKPHQGQHIGEMSDSSNNVI

SEQ ID NO: 120775 - protein, 27 aa, Artificial Sequence
  Cyclic GFR-binding peptide
DSSNNVIEYQKYVVKENEDIYLMSIPS

SEQ ID NO: 120776 - protein, 27 aa, Artificial Sequence
  Cyclic GFR-binding peptide
DSSNNVIRYKKLIKPTKGIFYLISIAN

SEQ ID NO: 120777 - protein, 27 aa, Artificial Sequence
  Cyclic GFR-binding peptide
DSSNNVIEYKFKVKPTRGVLYLISIPE

SEQ ID NO: 120778 - protein, 27 aa, Artificial Sequence
  Cyclic GFR-binding peptide
DSSNNVIYHYKLVVKDYEDKYLMSIPS

SEQ ID NO: 120779 - protein, 27 aa, Artificial Sequence
  Cyclic GFR-binding peptide
DSSNNVIEYKFKTPVGMDDLYLVSIPE

SEQ ID NO: 120780 - protein, 27 aa, Artificial Sequence
  Cyclic GFR-binding peptide
DSSNNVIEYQKYVKPKRGVIYLISIPS

SEQ ID NO: 120781 - protein, 27 aa, Artificial Sequence
  Cyclic GFR-binding peptide
DSSNNVIRYKKLVVKDYEDFYLMSIAN

SEQ ID NO: 120782 - protein, 27 aa, Artificial Sequence
  Cyclic GFR-binding peptide
DSSNNVIEYQKYVVKDYEDIYLMSIPS

SEQ ID NO: 120783 - protein, 27 aa, Artificial Sequence
  Cyclic GFR-binding peptide
DSSNNVIRYKKLVKPTRGVFYLISIAN

SEQ ID NO: 120784 - protein, 27 aa, Artificial Sequence
  Cyclic GFR-binding peptide
DSSNNVIYHYKLIKPTKGIKYLISIPS

SEQ ID NO: 120785 - protein, 27 aa, Artificial Sequence
  Cyclic GFR-binding peptide
DSSNNVIYHYKLVVKENEDKYLMSIPS

SEQ ID NO: 120786 - protein, 27 aa, Artificial Sequence
  Cyclic GFR-binding peptide
DSSNNVIYHYKLVKPKRGVKYLISIPS

SEQ ID NO: 120787 - protein, 27 aa, Artificial Sequence
  Cyclic GFR-binding peptide
DSSNNVIEYKFKIKPTKGILYLISIPE

SEQ ID NO: 120788 - protein, 27 aa, Artificial Sequence
  Cyclic GFR-binding peptide
DSSNNVIEYQKYIKPTKGIIYLISIPS

SEQ ID NO: 120789 - protein, 27 aa, Artificial Sequence
  Cyclic GFR-binding peptide
DSSNNVIRYKKLVVKENEDFYLMSIAN

SEQ ID NO: 120790 - protein, 27 aa, Artificial Sequence
  Cyclic GFR-binding peptide
DSSNNVIRYKKLVVNNAADFYLISIAN

SEQ ID NO: 120791 - protein, 27 aa, Artificial Sequence
  Cyclic GFR-binding peptide
DSSNNVIYHYKLYTVVGKDKYLISIPS

SEQ ID NO: 120792 - protein, 27 aa, Artificial Sequence
  Cyclic GFR-binding peptide
DSSNNVIRYKKLTPVGMDDFYLVSIAN

SEQ ID NO: 120793 - protein, 27 aa, Artificial Sequence
  Cyclic GFR-binding peptide
DSSNNVIRYKKLVKPKRGVFYLISIAN

SEQ ID NO: 120794 - protein, 27 aa, Artificial Sequence
  Cyclic GFR-binding peptide
DSSNNVIYHYKLVVNNAADKYLISIPS

SEQ ID NO: 120795 - protein, 27 aa, Artificial Sequence
  Cyclic GFR-binding peptide
DSSNNVIYHYKLIVNSSDDKYLVSIPS

SEQ ID NO: 120796 - protein, 27 aa, Artificial Sequence
  Cyclic GFR-binding peptide
DSSNNVIRYKKLIVNNSSDFYLVSIAN

SEQ ID NO: 120797 - protein, 27 aa, Artificial Sequence
  Cyclic GFR-binding peptide
DSSNNVIRYKKLYTVVGKDFYLISIAN

SEQ ID NO: 120798 - protein, 27 aa, Artificial Sequence
  Cyclic GFR-binding peptide
DSSNNVIEYQKYVVNNAADIYLISIPS

SEQ ID NO: 120799 - protein, 27 aa, Artificial Sequence
  Cyclic GFR-binding peptide
DSSNNVIRYKKLIVNSSDDFYLVSIAN

SEQ ID NO: 120800 - protein, 27 aa, Artificial Sequence
  Cyclic GFR-binding peptide
DSSNNVIEYKFKIVNNSSDLYLVSIPE

SEQ ID NO: 120801 - protein, 27 aa, Artificial Sequence
  Cyclic GFR-binding peptide
DSSNNVIEYQKYVKPTRGVIYLISIPS

SEQ ID NO: 120802 - protein, 27 aa, Artificial Sequence
  Cyclic GFR-binding peptide
DSSNNVIEYQKYIVNSSDDIYLVSIPS

SEQ ID NO: 120803 - protein, 27 aa, Artificial Sequence
  Cyclic GFR-binding peptide
DSSNNVIYHYKLTPVGMDDKYLVSIPS

SEQ ID NO: 120804 - protein, 27 aa, Artificial Sequence
  Cyclic GFR-binding peptide
DSSNNVIYHYKLIVNNSSDKYLVSIPS

SEQ ID NO: 120805 - protein, 27 aa, Artificial Sequence
  Cyclic GFR-binding peptide
DSSNNVIEYKFKIVNSSDDLYLVSIPE

SEQ ID NO: 120806 - protein, 27 aa, Artificial Sequence
  Cyclic GFR-binding peptide
DSSNNVIYHYKLVKPTRGVKYLISIPS

SEQ ID NO: 120807 - protein, 27 aa, Artificial Sequence
  Cyclic GFR-binding peptide
DSSNNVIEYKFKVKPKRGVLYLISIPE

SEQ ID NO: 120808 - protein, 27 aa, Artificial Sequence
  Cyclic GFR-binding peptide
DSSNNVIEYQKYYTVVGKDIYLISIPS

SEQ ID NO: 120809 - protein, 27 aa, Artificial Sequence
  Cyclic GFR-binding peptide
DSSNNVIEYKFKVVKENEDLYLMSIPE

SEQ ID NO: 120810 - protein, 27 aa, Artificial Sequence
  Cyclic GFR-binding peptide
DSSNNVIEYQKYTPVGMDDIYLVSIPS

SEQ ID NO: 120811 - protein, 27 aa, Artificial Sequence
  Cyclic GFR-binding peptide
DSSNNVIEYQKYIVNNSSDIYLVSIPS

SEQ ID NO: 120812 - protein, 27 aa, Artificial Sequence
  Cyclic GFR-binding peptide
DSSNNVIEYKFKVVKDYEDLYLMSIPE

SEQ ID NO: 120813 - protein, 27 aa, Artificial Sequence
  Cyclic GFR-binding peptide
DSSNNVIEYKFKYTVVGKDLYLISIPE

SEQ ID NO: 120814 - protein, 27 aa, Artificial Sequence
  Cyclic GFR-binding peptide
DSSNNVIEYKFKVVNNAADLYLISIPE

SEQ ID NO: 120815 - protein, 27 aa, Artificial Sequence
  Cyclic GFR-binding peptide
SPISMLYIDENEKVVYKQYEDSSNNVI

SEQ ID NO: 120816 - protein, 27 aa, Artificial Sequence
  Cyclic GFR-binding peptide
NAISILYFIGKTPKILKKYRDSSNNVI

SEQ ID NO: 120817 - protein, 27 aa, Artificial Sequence
  Cyclic GFR-binding peptide
EPISILYLVGRTPKVKFKYEDSSNNVI

SEQ ID NO: 120818 - protein, 27 aa, Artificial Sequence
  Cyclic GFR-binding peptide
SPISMLYKDEYDKVVLKYHYDSSNNVI

SEQ ID NO: 120819 - protein, 27 aa, Artificial Sequence
  Cyclic GFR-binding peptide
EPISVLYLDDMGVPTKFKYEDSSNNVI

SEQ ID NO: 120820 - protein, 27 aa, Artificial Sequence
  Cyclic GFR-binding peptide
SPISILYIVGRKPKVYKQYEDSSNNVI

SEQ ID NO: 120821 - protein, 27 aa, Artificial Sequence
  Cyclic GFR-binding peptide
NAISMLYFDEYDKVVLKKYRDSSNNVI

SEQ ID NO: 120822 - protein, 27 aa, Artificial Sequence
  Cyclic GFR-binding peptide
SPISMLYIDEYDKVVYKQYEDSSNNVI

SEQ ID NO: 120823 - protein, 27 aa, Artificial Sequence
  Cyclic GFR-binding peptide
NAISILYFVGRTPKVLKKYRDSSNNVI

SEQ ID NO: 120824 - protein, 27 aa, Artificial Sequence
  Cyclic GFR-binding peptide
SPISILYKIGKTPKILKYHYDSSNNVI

SEQ ID NO: 120825 - protein, 27 aa, Artificial Sequence
  Cyclic GFR-binding peptide
SPISMLYKDENEKVVLKYHYDSSNNVI

SEQ ID NO: 120826 - protein, 27 aa, Artificial Sequence
  Cyclic GFR-binding peptide
SPISILYKVGRKPKVLKYHYDSSNNVI

SEQ ID NO: 120827 - protein, 27 aa, Artificial Sequence
  Cyclic GFR-binding peptide
EPISILYLIGKTPKIKFKYEDSSNNVI

SEQ ID NO: 120828 - protein, 27 aa, Artificial Sequence
  Cyclic GFR-binding peptide
SPISILYIIGKTPKIYKQYEDSSNNVI

SEQ ID NO: 120829 - protein, 27 aa, Artificial Sequence
  Cyclic GFR-binding peptide
NAISMLYFDENEKVVLKKYRDSSNNVI

SEQ ID NO: 120830 - protein, 27 aa, Artificial Sequence
  Cyclic GFR-binding peptide
NAISILYFDAANNVVLKKYRDSSNNVI

SEQ ID NO: 120831 - protein, 27 aa, Artificial Sequence
  Cyclic GFR-binding peptide
SPISILYKDKGVVTYLKYHYDSSNNVI

SEQ ID NO: 120832 - protein, 27 aa, Artificial Sequence
  Cyclic GFR-binding peptide
NAISVLYFDDMGVPTLKKYRDSSNNVI

SEQ ID NO: 120833 - protein, 27 aa, Artificial Sequence
  Cyclic GFR-binding peptide
NAISILYFVGRKPKVLKKYRDSSNNVI

SEQ ID NO: 120834 - protein, 27 aa, Artificial Sequence
  Cyclic GFR-binding peptide
SPISILYKDAANNVVLKYHYDSSNNVI

SEQ ID NO: 120835 - protein, 27 aa, Artificial Sequence
  Cyclic GFR-binding peptide
SPISVLYKDDSSNVILKYHYDSSNNVI

SEQ ID NO: 120836 - protein, 27 aa, Artificial Sequence
  Cyclic GFR-binding peptide
NAISVLYFDSSNNVILKKYRDSSNNVI

SEQ ID NO: 120837 - protein, 27 aa, Artificial Sequence
  Cyclic GFR-binding peptide
NAISILYFDKGVVTYLKKYRDSSNNVI

SEQ ID NO: 120838 - protein, 27 aa, Artificial Sequence
  Cyclic GFR-binding peptide
SPISILYIDAANNVVYKQYEDSSNNVI

SEQ ID NO: 120839 - protein, 27 aa, Artificial Sequence
  Cyclic GFR-binding peptide
NAISVLYFDDSSNVILKKYRDSSNNVI

SEQ ID NO: 120840 - protein, 27 aa, Artificial Sequence
  Cyclic GFR-binding peptide
EPISVLYLDSSNNVIKFKYEDSSNNVI

SEQ ID NO: 120841 - protein, 27 aa, Artificial Sequence
  Cyclic GFR-binding peptide
SPISILYIVGRTPKVYKQYEDSSNNVI

SEQ ID NO: 120842 - protein, 27 aa, Artificial Sequence
  Cyclic GFR-binding peptide
SPISVLYIDDSSNVIYKQYEDSSNNVI

SEQ ID NO: 120843 - protein, 27 aa, Artificial Sequence
  Cyclic GFR-binding peptide
SPISVLYKDDMGVPTLKYHYDSSNNVI

SEQ ID NO: 120844 - protein, 27 aa, Artificial Sequence
  Cyclic GFR-binding peptide
SPISVLYKDSSNNVILKYHYDSSNNVI

SEQ ID NO: 120845 - protein, 27 aa, Artificial Sequence
  Cyclic GFR-binding peptide
EPISVLYLDDSSNVIKFKYEDSSNNVI

SEQ ID NO: 120846 - protein, 27 aa, Artificial Sequence
  Cyclic GFR-binding peptide
SPISILYKVGRTPKVLKYHYDSSNNVI

SEQ ID NO: 120847 - protein, 27 aa, Artificial Sequence
  Cyclic GFR-binding peptide
EPISILYLVGRKPKVKFKYEDSSNNVI

SEQ ID NO: 120848 - protein, 27 aa, Artificial Sequence
  Cyclic GFR-binding peptide
SPISILYIDKGVVTYYKQYEDSSNNVI

SEQ ID NO: 120849 - protein, 27 aa, Artificial Sequence
  Cyclic GFR-binding peptide
EPISMLYLDENEKVVKFKYEDSSNNVI

SEQ ID NO: 120850 - protein, 27 aa, Artificial Sequence
  Cyclic GFR-binding peptide
SPISVLYIDDMGVPTYKQYEDSSNNVI

SEQ ID NO: 120851 - protein, 27 aa, Artificial Sequence
  Cyclic GFR-binding peptide
SPISVLYIDSSNNVIYKQYEDSSNNVI

SEQ ID NO: 120852 - protein, 27 aa, Artificial Sequence
  Cyclic GFR-binding peptide
EPISMLYLDEYDKVVKFKYEDSSNNVI

SEQ ID NO: 120853 - protein, 27 aa, Artificial Sequence
  Cyclic GFR-binding peptide
EPISILYLDKGVVTYKFKYEDSSNNVI

SEQ ID NO: 120854 - protein, 27 aa, Artificial Sequence
  Cyclic GFR-binding peptide
EPISILYLDAANNVVKFKYEDSSNNVI

SEQ ID NO: 120855 - protein, 27 aa, Artificial Sequence
  Cyclic GFR-binding peptide
DSSNNVIPIKGYIIQQKDNFYLMNIPS

SEQ ID NO: 120856 - protein, 27 aa, Artificial Sequence
  Cyclic GFR-binding peptide
DSSNNVIPIKGYVVKDYEDFYLMNIPS

SEQ ID NO: 120857 - protein, 27 aa, Artificial Sequence
  Cyclic GFR-binding peptide
DSSNNVIPIKGYIVNSSDDFYLVNIPS

SEQ ID NO: 120858 - protein, 27 aa, Artificial Sequence
  Cyclic GFR-binding peptide
DSSNNVIPIKGYLLVRGNDFYLMNIPS

SEQ ID NO: 120859 - protein, 27 aa, Artificial Sequence
  Cyclic GFR-binding peptide
DSSNNVIPIKGYVVNNAADFYLINIPS

SEQ ID NO: 120860 - protein, 27 aa, Artificial Sequence
  Cyclic GFR-binding peptide
DSSNNVIPIKGYVVKENEDFYLMNIPS

SEQ ID NO: 120861 - protein, 27 aa, Artificial Sequence
  Cyclic GFR-binding peptide
DSSNNVIPIKGYVVNNASDFYLINIPS

SEQ ID NO: 120862 - protein, 27 aa, Artificial Sequence
  Cyclic GFR-binding peptide
DSSNNVIPIKGYYTVVGKDFYLINIPS

SEQ ID NO: 120863 - protein, 27 aa, Artificial Sequence
  Cyclic GFR-binding peptide
DSSNNVIPIKGYTPVGMDDFYLVNIPS

SEQ ID NO: 120864 - protein, 27 aa, Artificial Sequence
  Cyclic GFR-binding peptide
DSSNNVIPIKGYIVNNSSDFYLVNIPS

SEQ ID NO: 120865 - protein, 27 aa, Artificial Sequence
  Cyclic GFR-binding peptide
SPINMLYFNDKQQIIYGKIPDSSNNVI

SEQ ID NO: 120866 - protein, 27 aa, Artificial Sequence
  Cyclic GFR-binding peptide
SPINMLYFDEYDKVVYGKIPDSSNNVI

SEQ ID NO: 120867 - protein, 27 aa, Artificial Sequence
  Cyclic GFR-binding peptide
SPINVLYFDDSSNVIYGKIPDSSNNVI

SEQ ID NO: 120868 - protein, 27 aa, Artificial Sequence
  Cyclic GFR-binding peptide
SPINMLYFDNGRVLLYGKIPDSSNNVI

SEQ ID NO: 120869 - protein, 27 aa, Artificial Sequence
  Cyclic GFR-binding peptide
SPINILYFDAANNVVYGKIPDSSNNVI

SEQ ID NO: 120870 - protein, 27 aa, Artificial Sequence
  Cyclic GFR-binding peptide
SPINMLYFDENEKVVYGKIPDSSNNVI

SEQ ID NO: 120871 - protein, 27 aa, Artificial Sequence
  Cyclic GFR-binding peptide
SPINILYFDSANNVVYGKIPDSSNNVI

SEQ ID NO: 120872 - protein, 27 aa, Artificial Sequence
  Cyclic GFR-binding peptide
SPINILYFDKGVVTYYGKIPDSSNNVI

SEQ ID NO: 120873 - protein, 27 aa, Artificial Sequence
  Cyclic GFR-binding peptide
SPINVLYFDDMGVPTYGKIPDSSNNVI

SEQ ID NO: 120874 - protein, 27 aa, Artificial Sequence
  Cyclic GFR-binding peptide
SPINVLYFDSSNNVIYGKIPDSSNNVI

SEQ ID NO: 120875 - protein, 27 aa, Artificial Sequence
  Cyclic GFR-binding peptide
DSSNNVIPIKGYIIQQKDNFYLMNIPS

SEQ ID NO: 120876 - protein, 27 aa, Artificial Sequence
  Cyclic GFR-binding peptide
DSSNNVIPIKGYVVKDYEDFYLMNIPS

SEQ ID NO: 120877 - protein, 27 aa, Artificial Sequence
  Cyclic GFR-binding peptide
DSSNNVIPIKGYIVNSSDDFYLVNIPS

SEQ ID NO: 120878 - protein, 27 aa, Artificial Sequence
  Cyclic GFR-binding peptide
DSSNNVIPIKGYLLVRGNDFYLMNIPS

SEQ ID NO: 120879 - protein, 27 aa, Artificial Sequence
  Cyclic GFR-binding peptide
DSSNNVIPIKGYVVNNAADFYLINIPS

SEQ ID NO: 120880 - protein, 27 aa, Artificial Sequence
  Cyclic GFR-binding peptide
DSSNNVIPIKGYVVKENEDFYLMNIPS

SEQ ID NO: 120881 - protein, 27 aa, Artificial Sequence
  Cyclic GFR-binding peptide
DSSNNVIPIKGYVVNNASDFYLINIPS

SEQ ID NO: 120882 - protein, 27 aa, Artificial Sequence
  Cyclic GFR-binding peptide
DSSNNVIPIKGYYTVVGKDFYLINIPS

SEQ ID NO: 120883 - protein, 27 aa, Artificial Sequence
  Cyclic GFR-binding peptide
DSSNNVIPIKGYTPVGMDDFYLVNIPS

SEQ ID NO: 120884 - protein, 27 aa, Artificial Sequence
  Cyclic GFR-binding peptide
DSSNNVIPIKGYIVNNSSDFYLVNIPS

SEQ ID NO: 120885 - protein, 27 aa, Artificial Sequence
  Cyclic GFR-binding peptide
SPINMLYFNDKQQIIYGKIPDSSNNVI

SEQ ID NO: 120886 - protein, 27 aa, Artificial Sequence
  Cyclic GFR-binding peptide
SPINMLYFDEYDKVVYGKIPDSSNNVI

SEQ ID NO: 120887 - protein, 27 aa, Artificial Sequence
  Cyclic GFR-binding peptide
SPINVLYFDDSSNVIYGKIPDSSNNVI

SEQ ID NO: 120888 - protein, 27 aa, Artificial Sequence
  Cyclic GFR-binding peptide
SPINMLYFDNGRVLLYGKIPDSSNNVI

SEQ ID NO: 120889 - protein, 27 aa, Artificial Sequence
  Cyclic GFR-binding peptide
SPINILYFDAANNVVYGKIPDSSNNVI

SEQ ID NO: 120890 - protein, 27 aa, Artificial Sequence
  Cyclic GFR-binding peptide
SPINMLYFDENEKVVYGKIPDSSNNVI

SEQ ID NO: 120891 - protein, 27 aa, Artificial Sequence
  Cyclic GFR-binding peptide
SPINILYFDSANNVVYGKIPDSSNNVI

SEQ ID NO: 120892 - protein, 27 aa, Artificial Sequence
  Cyclic GFR-binding peptide
SPINILYFDKGVVTYYGKIPDSSNNVI

SEQ ID NO: 120893 - protein, 27 aa, Artificial Sequence
  Cyclic GFR-binding peptide
SPINVLYFDDMGVPTYGKIPDSSNNVI

SEQ ID NO: 120894 - protein, 27 aa, Artificial Sequence
  Cyclic GFR-binding peptide
SPINVLYFDSSNNVIYGKIPDSSNNVI

SEQ ID NO: 120895 - protein, 27 aa, Artificial Sequence
  Cyclic GFR-binding peptide
DSSNNVIRYKKLIKPTKGIFYLISIAN

SEQ ID NO: 120896 - protein, 27 aa, Artificial Sequence
  Cyclic GFR-binding peptide
DSSNNVIRYKKLVVKDYEDFYLMSIAN

SEQ ID NO: 120897 - protein, 27 aa, Artificial Sequence
  Cyclic GFR-binding peptide
DSSNNVIRYKKLVKPTRGVFYLISIAN

SEQ ID NO: 120898 - protein, 27 aa, Artificial Sequence
  Cyclic GFR-binding peptide
DSSNNVIRYKKLVVKENEDFYLMSIAN

SEQ ID NO: 120899 - protein, 27 aa, Artificial Sequence
  Cyclic GFR-binding peptide
DSSNNVIRYKKLVKPKRGVFYLISIAN

SEQ ID NO: 120900 - protein, 27 aa, Artificial Sequence
  Cyclic GFR-binding peptide
DSSNNVIRYKKLIVNSSDDFYLVSIAN

SEQ ID NO: 120901 - protein, 27 aa, Artificial Sequence
  Cyclic GFR-binding peptide
DSSNNVIRYKKLVVNNASDFYLISIAN

SEQ ID NO: 120902 - protein, 27 aa, Artificial Sequence
  Cyclic GFR-binding peptide
NAISILYFIGKTPKILKKYRDSSNNVI

SEQ ID NO: 120903 - protein, 27 aa, Artificial Sequence
  Cyclic GFR-binding peptide
NAISMLYFDEYDKVVLKKYRDSSNNVI

SEQ ID NO: 120904 - protein, 27 aa, Artificial Sequence
  Cyclic GFR-binding peptide
NAISILYFVGRTPKVLKKYRDSSNNVI

SEQ ID NO: 120905 - protein, 27 aa, Artificial Sequence
  Cyclic GFR-binding peptide
NAISMLYFDENEKVVLKKYRDSSNNVI

SEQ ID NO: 120906 - protein, 27 aa, Artificial Sequence
  Cyclic GFR-binding peptide
NAISILYFVGRKPKVLKKYRDSSNNVI

SEQ ID NO: 120907 - protein, 27 aa, Artificial Sequence
  Cyclic GFR-binding peptide
NAISVLYFDDSSNVILKKYRDSSNNVI

SEQ ID NO: 120908 - protein, 27 aa, Artificial Sequence
  Cyclic GFR-binding peptide
NAISILYFDSANNVVLKKYRDSSNNVI

SEQ ID NO: 120909 - protein, 27 aa, Artificial Sequence
  Cyclic GFR-binding peptide
DSSNNVIEYQKYVVKENEDIYLMSIPS

SEQ ID NO: 120910 - protein, 27 aa, Artificial Sequence
  Cyclic GFR-binding peptide
DSSNNVINSLQEVVKDYEDYYLMTLPE

SEQ ID NO: 120911 - protein, 27 aa, Artificial Sequence
  Cyclic GFR-binding peptide
DSSNNVIEYQKYVVKENEDIFLMSIPS

SEQ ID NO: 120912 - protein, 27 aa, Artificial Sequence
  Cyclic GFR-binding peptide
DSSNNVINSLQEIKPTKGIYYVIPLPE

SEQ ID NO: 120913 - protein, 27 aa, Artificial Sequence
  Cyclic GFR-binding peptide
DSSNNVINSLQEVKPKRGVYYLITLPE

SEQ ID NO: 120914 - protein, 27 aa, Artificial Sequence
  Cyclic GFR-binding peptide
DSSNNVIEYQKYVVNNAADIYLISIPS

SEQ ID NO: 120915 - protein, 27 aa, Artificial Sequence
  Cyclic GFR-binding peptide
DSSNNVINSLQEVKPTRGVYYVIPLPE

SEQ ID NO: 120916 - protein, 27 aa, Artificial Sequence
  Cyclic GFR-binding peptide
DSSNNVIEYQKYIVNSSDDIFLVSIPS

SEQ ID NO: 120917 - protein, 27 aa, Artificial Sequence
  Cyclic GFR-binding peptide
DSSNNVIEYQKYVKPTRGVIFLISIPS

SEQ ID NO: 120918 - protein, 27 aa, Artificial Sequence
  Cyclic GFR-binding peptide
DSSNNVIEYQKYVVKDYEDIYLMSIPS

SEQ ID NO: 120919 - protein, 27 aa, Artificial Sequence
  Cyclic GFR-binding peptide
DSSNNVINSLQEVVKENEDYYLMTLPE

SEQ ID NO: 120920 - protein, 27 aa, Artificial Sequence
  Cyclic GFR-binding peptide
DSSNNVINSLQEVVNNASDYYLITLPE

SEQ ID NO: 120921 - protein, 27 aa, Artificial Sequence
  Cyclic GFR-binding peptide
DSSNNVINSLQEVKPKRGVYYVIPLPE

SEQ ID NO: 120922 - protein, 27 aa, Artificial Sequence
  Cyclic GFR-binding peptide
DSSNNVIEYQKYIVNSSDDIYLVSIPS

SEQ ID NO: 120923 - protein, 27 aa, Artificial Sequence
  Cyclic GFR-binding peptide
DSSNNVINSLQEVVKENEDYYVMPLPE

SEQ ID NO: 120924 - protein, 27 aa, Artificial Sequence
  Cyclic GFR-binding peptide
DSSNNVIEYQKYVVKDYEDIFLMSIPS

SEQ ID NO: 120925 - protein, 27 aa, Artificial Sequence
  Cyclic GFR-binding peptide
DSSNNVINSLQEVVNNASDYYVIPLPE

SEQ ID NO: 120926 - protein, 27 aa, Artificial Sequence
  Cyclic GFR-binding peptide
DSSNNVIEYQKYVVNNASDIYLISIPS

SEQ ID NO: 120927 - protein, 27 aa, Artificial Sequence
  Cyclic GFR-binding peptide
DSSNNVINSLQEVKPTRGVYYLITLPE

SEQ ID NO: 120928 - protein, 27 aa, Artificial Sequence
  Cyclic GFR-binding peptide
DSSNNVIEYQKYYTVVGKDIYLISIPS

SEQ ID NO: 120929 - protein, 27 aa, Artificial Sequence
  Cyclic GFR-binding peptide
DSSNNVIEYQKYIIQQKDNIYLMSIPS

SEQ ID NO: 120930 - protein, 27 aa, Artificial Sequence
  Cyclic GFR-binding peptide
DSSNNVIEYQKYTPVGMDDIYLVSIPS

SEQ ID NO: 120931 - protein, 27 aa, Artificial Sequence
  Cyclic GFR-binding peptide
DSSNNVIEYQKYIKPTKGIIFLISIPS

SEQ ID NO: 120932 - protein, 27 aa, Artificial Sequence
  Cyclic GFR-binding peptide
DSSNNVIEYQKYIVNNSSDIYLVSIPS

SEQ ID NO: 120933 - protein, 27 aa, Artificial Sequence
  Cyclic GFR-binding peptide
DSSNNVINSLQEIKPTKGIYYLITLPE

SEQ ID NO: 120934 - protein, 27 aa, Artificial Sequence
  Cyclic GFR-binding peptide
DSSNNVIEYQKYVVNNASDIFLISIPS

SEQ ID NO: 120935 - protein, 27 aa, Artificial Sequence
  Cyclic GFR-binding peptide
DSSNNVIEYQKYVKPKRGVIFLISIPS

SEQ ID NO: 120936 - protein, 27 aa, Artificial Sequence
  Cyclic GFR-binding peptide
DSSNNVINSLQEIVNSSDDYYVVPLPE

SEQ ID NO: 120937 - protein, 27 aa, Artificial Sequence
  Cyclic GFR-binding peptide
DSSNNVINSLQEVVKDYEDYYVMPLPE

SEQ ID NO: 120938 - protein, 27 aa, Artificial Sequence
  Cyclic GFR-binding peptide
DSSNNVIEYQKYLLVRGNDIYLMSIPS

SEQ ID NO: 120939 - protein, 27 aa, Artificial Sequence
  Cyclic GFR-binding peptide
DSSNNVINSLQEIVNSSDDYYLVTLPE

SEQ ID NO: 120940 - protein, 27 aa, Artificial Sequence
  Cyclic GFR-binding peptide
SPISMLYIDENEKVVYKQYEDSSNNVI

SEQ ID NO: 120941 - protein, 27 aa, Artificial Sequence
  Cyclic GFR-binding peptide
EPLTMLYYDEYDKVVEQLSNDSSNNVI

SEQ ID NO: 120942 - protein, 27 aa, Artificial Sequence
  Cyclic GFR-binding peptide
SPISMLFIDENEKVVYKQYEDSSNNVI

SEQ ID NO: 120943 - protein, 27 aa, Artificial Sequence
  Cyclic GFR-binding peptide
EPLPIVYYIGKTPKIEQLSNDSSNNVI

SEQ ID NO: 120944 - protein, 27 aa, Artificial Sequence
  Cyclic GFR-binding peptide
EPLTILYYVGRKPKVEQLSNDSSNNVI

SEQ ID NO: 120945 - protein, 27 aa, Artificial Sequence
  Cyclic GFR-binding peptide
SPISILYIDAANNVVYKQYEDSSNNVI

SEQ ID NO: 120946 - protein, 27 aa, Artificial Sequence
  Cyclic GFR-binding peptide
EPLPIVYYVGRTPKVEQLSNDSSNNVI

SEQ ID NO: 120947 - protein, 27 aa, Artificial Sequence
  Cyclic GFR-binding peptide
SPISVLFIDDSSNVIYKQYEDSSNNVI

SEQ ID NO: 120948 - protein, 27 aa, Artificial Sequence
  Cyclic GFR-binding peptide
SPISILFIVGRTPKVYKQYEDSSNNVI

SEQ ID NO: 120949 - protein, 27 aa, Artificial Sequence
  Cyclic GFR-binding peptide
SPISMLYIDEYDKVVYKQYEDSSNNVI

SEQ ID NO: 120950 - protein, 27 aa, Artificial Sequence
  Cyclic GFR-binding peptide
EPLTMLYYDENEKVVEQLSNDSSNNVI

SEQ ID NO: 120951 - protein, 27 aa, Artificial Sequence
  Cyclic GFR-binding peptide
EPLTILYYDSANNVVEQLSNDSSNNVI

SEQ ID NO: 120952 - protein, 27 aa, Artificial Sequence
  Cyclic GFR-binding peptide
EPLPIVYYVGRKPKVEQLSNDSSNNVI

SEQ ID NO: 120953 - protein, 27 aa, Artificial Sequence
  Cyclic GFR-binding peptide
SPISVLYIDDSSNVIYKQYEDSSNNVI

SEQ ID NO: 120954 - protein, 27 aa, Artificial Sequence
  Cyclic GFR-binding peptide
EPLPMVYYDENEKVVEQLSNDSSNNVI

SEQ ID NO: 120955 - protein, 27 aa, Artificial Sequence
  Cyclic GFR-binding peptide
SPISMLFIDEYDKVVYKQYEDSSNNVI

SEQ ID NO: 120956 - protein, 27 aa, Artificial Sequence
  Cyclic GFR-binding peptide
EPLPIVYYDSANNVVEQLSNDSSNNVI

SEQ ID NO: 120957 - protein, 27 aa, Artificial Sequence
  Cyclic GFR-binding peptide
SPISILYIDSANNVVYKQYEDSSNNVI

SEQ ID NO: 120958 - protein, 27 aa, Artificial Sequence
  Cyclic GFR-binding peptide
EPLTILYYVGRTPKVEQLSNDSSNNVI

SEQ ID NO: 120959 - protein, 27 aa, Artificial Sequence
  Cyclic GFR-binding peptide
SPISILYIDKGVVTYYKQYEDSSNNVI

SEQ ID NO: 120960 - protein, 27 aa, Artificial Sequence
  Cyclic GFR-binding peptide
SPISMLYINDKQQIIYKQYEDSSNNVI

SEQ ID NO: 120961 - protein, 27 aa, Artificial Sequence
  Cyclic GFR-binding peptide
SPISVLYIDDMGVPTYKQYEDSSNNVI

SEQ ID NO: 120962 - protein, 27 aa, Artificial Sequence
  Cyclic GFR-binding peptide
SPISILFIIGKTPKIYKQYEDSSNNVI

SEQ ID NO: 120963 - protein, 27 aa, Artificial Sequence
  Cyclic GFR-binding peptide
SPISVLYIDSSNNVIYKQYEDSSNNVI

SEQ ID NO: 120964 - protein, 27 aa, Artificial Sequence
  Cyclic GFR-binding peptide
EPLTILYYIGKTPKIEQLSNDSSNNVI

SEQ ID NO: 120965 - protein, 27 aa, Artificial Sequence
  Cyclic GFR-binding peptide
SPISILFIDSANNVVYKQYEDSSNNVI

SEQ ID NO: 120966 - protein, 27 aa, Artificial Sequence
  Cyclic GFR-binding peptide
SPISILFIVGRKPKVYKQYEDSSNNVI

SEQ ID NO: 120967 - protein, 27 aa, Artificial Sequence
  Cyclic GFR-binding peptide
EPLPVVYYDDSSNVIEQLSNDSSNNVI

SEQ ID NO: 120968 - protein, 27 aa, Artificial Sequence
  Cyclic GFR-binding peptide
EPLPMVYYDEYDKVVEQLSNDSSNNVI

SEQ ID NO: 120969 - protein, 27 aa, Artificial Sequence
  Cyclic GFR-binding peptide
SPISMLYIDNGRVLLYKQYEDSSNNVI

SEQ ID NO: 120970 - protein, 27 aa, Artificial Sequence
  Cyclic GFR-binding peptide
EPLTVLYYDDSSNVIEQLSNDSSNNVI

SEQ ID NO: 120971 - protein, 27 aa, Artificial Sequence
  Cyclic GFR-binding peptide
DSSNNVIPYVKLVVKENEDFFLMSLSS

SEQ ID NO: 120972 - protein, 29 aa, Artificial Sequence
  Cyclic GFR-binding peptide
DSSNNVIPYVKLHQGQHPKIRFFLMSLSS

SEQ ID NO: 120973 - protein, 27 aa, Artificial Sequence
  Cyclic GFR-binding peptide
DSSNNVIPYVKLVVNKNEDFFLISLSS

SEQ ID NO: 120974 - protein, 27 aa, Artificial Sequence
  Cyclic GFR-binding peptide
DSSNNVIPYVKLVKPKRGVLFFISLSS

SEQ ID NO: 120975 - protein, 27 aa, Artificial Sequence
  Cyclic GFR-binding peptide
DSSNNVIPYVKLVVNNAADFFLISLSS

SEQ ID NO: 120976 - protein, 27 aa, Artificial Sequence
  Cyclic GFR-binding peptide
DSSNNVIPYVKLIVNNSSDFFLVSLSS

SEQ ID NO: 120977 - protein, 27 aa, Artificial Sequence
  Cyclic GFR-binding peptide
DSSNNVIPYVKLIIQQKDNFFLMSLSS

SEQ ID NO: 120978 - protein, 27 aa, Artificial Sequence
  Cyclic GFR-binding peptide
DSSNNVIPYVKLLLVRGNDFFLMSLSS

SEQ ID NO: 120979 - protein, 27 aa, Artificial Sequence
  Cyclic GFR-binding peptide
DSSNNVIPYVKLVKPTRGVLFFISLSS

SEQ ID NO: 120980 - protein, 27 aa, Artificial Sequence
  Cyclic GFR-binding peptide
DSSNNVIPYVKLVVNNASDFFLISLSS

SEQ ID NO: 120981 - protein, 27 aa, Artificial Sequence
  Cyclic GFR-binding peptide
DSSNNVIPYVKLIKPTKGILFFISLSS

SEQ ID NO: 120982 - protein, 27 aa, Artificial Sequence
  Cyclic GFR-binding peptide
DSSNNVIPYVKLTPVGMDDFFLVSLSS

SEQ ID NO: 120983 - protein, 27 aa, Artificial Sequence
  Cyclic GFR-binding peptide
DSSNNVIPYVKLYTVVGKDFFLISLSS

SEQ ID NO: 120984 - protein, 27 aa, Artificial Sequence
  Cyclic GFR-binding peptide
DSSNNVIPYVKLVVKDYEDFFLMSLSS

SEQ ID NO: 120985 - protein, 27 aa, Artificial Sequence
  Cyclic GFR-binding peptide
DSSNNVIPYVKLIVNSSDDFFLVSLSS

SEQ ID NO: 120986 - protein, 29 aa, Artificial Sequence
  Cyclic GFR-binding peptide
DSSNNVIPYVKLLKPKKRVYEFFLVSLSS

SEQ ID NO: 120987 - protein, 27 aa, Artificial Sequence
  Cyclic GFR-binding peptide
SSLSMLFFDENEKVVLKVYPDSSNNVI

SEQ ID NO: 120988 - protein, 29 aa, Artificial Sequence
  Cyclic GFR-binding peptide
SSLSMLFFRIKPHQGQHLKVYPDSSNNVI

SEQ ID NO: 120989 - protein, 27 aa, Artificial Sequence
  Cyclic GFR-binding peptide
SSLSILFFDENKNVVLKVYPDSSNNVI

SEQ ID NO: 120990 - protein, 27 aa, Artificial Sequence
  Cyclic GFR-binding peptide
SSLSILFFVGRKPKVLKVYPDSSNNVI

SEQ ID NO: 120991 - protein, 27 aa, Artificial Sequence
  Cyclic GFR-binding peptide
SSLSILFFDAANNVVLKVYPDSSNNVI

SEQ ID NO: 120992 - protein, 27 aa, Artificial Sequence
  Cyclic GFR-binding peptide
SSLSVLFFDSSNNVILKVYPDSSNNVI

SEQ ID NO: 120993 - protein, 27 aa, Artificial Sequence
  Cyclic GFR-binding peptide
SSLSMLFFNDKQQIILKVYPDSSNNVI

SEQ ID NO: 120994 - protein, 27 aa, Artificial Sequence
  Cyclic GFR-binding peptide
SSLSMLFFDNGRVLLLKVYPDSSNNVI

SEQ ID NO: 120995 - protein, 27 aa, Artificial Sequence
  Cyclic GFR-binding peptide
SSLSILFFVGRTPKVLKVYPDSSNNVI

SEQ ID NO: 120996 - protein, 27 aa, Artificial Sequence
  Cyclic GFR-binding peptide
SSLSILFFDSANNVVLKVYPDSSNNVI

SEQ ID NO: 120997 - protein, 27 aa, Artificial Sequence
  Cyclic GFR-binding peptide
SSLSILFFIGKTPKILKVYPDSSNNVI

SEQ ID NO: 120998 - protein, 27 aa, Artificial Sequence
  Cyclic GFR-binding peptide
SSLSVLFFDDMGVPTLKVYPDSSNNVI

SEQ ID NO: 120999 - protein, 27 aa, Artificial Sequence
  Cyclic GFR-binding peptide
SSLSILFFDKGVVTYLKVYPDSSNNVI

SEQ ID NO: 121000 - protein, 27 aa, Artificial Sequence
  Cyclic GFR-binding peptide
SSLSMLFFDEYDKVVLKVYPDSSNNVI

SEQ ID NO: 121001 - protein, 27 aa, Artificial Sequence
  Cyclic GFR-binding peptide
SSLSVLFFDDSSNVILKVYPDSSNNVI

SEQ ID NO: 121002 - protein, 29 aa, Artificial Sequence
  Cyclic GFR-binding peptide
SSLSVLFFEYVRKKPKLLKVYPDSSNNVI

SEQ ID NO: 121003 - protein, 27 aa, Artificial Sequence
  Cyclic GFR-binding peptide
DSSNNVINSLQEVVKDYEDYYLMTLPE

SEQ ID NO: 121004 - protein, 27 aa, Artificial Sequence
  Cyclic GFR-binding peptide
DSSNNVINSLQEIKPTKGIYYVIPLPE

SEQ ID NO: 121005 - protein, 27 aa, Artificial Sequence
  Cyclic GFR-binding peptide
DSSNNVISMEGIIVNSSDDMIQVTINS

SEQ ID NO: 121006 - protein, 27 aa, Artificial Sequence
  Cyclic GFR-binding peptide
DSSNNVINSLQEVKPKRGVYYLITLPE

SEQ ID NO: 121007 - protein, 27 aa, Artificial Sequence
  Cyclic GFR-binding peptide
DSSNNVINSLQEVKPTRGVYYVIPLPE

SEQ ID NO: 121008 - protein, 27 aa, Artificial Sequence
  Cyclic GFR-binding peptide
DSSNNVIVTAKKVVKENEDIKRMQVPR

SEQ ID NO: 121009 - protein, 27 aa, Artificial Sequence
  Cyclic GFR-binding peptide
DSSNNVINSLQEIVNSSDDYYVVPLPE

SEQ ID NO: 121010 - protein, 29 aa, Artificial Sequence
  Cyclic GFR-binding peptide
DSSNNVISMEGIHQGQHPKIRMIQMTINS

SEQ ID NO: 121011 - protein, 29 aa, Artificial Sequence
  Cyclic GFR-binding peptide
DSSNNVIVTAKKLKPKKRVYEIKRVQVPR

SEQ ID NO: 121012 - protein, 27 aa, Artificial Sequence
  Cyclic GFR-binding peptide
DSSNNVISMEGIVVKDYEDMIQMTINS

SEQ ID NO: 121013 - protein, 29 aa, Artificial Sequence
  Cyclic GFR-binding peptide
DSSNNVIVQVEKHQGQHPKIRVKAMKVSR

SEQ ID NO: 121014 - protein, 27 aa, Artificial Sequence
  Cyclic GFR-binding peptide
DSSNNVIVTAKKIKPTKGIIKRIQVPR

SEQ ID NO: 121015 - protein, 27 aa, Artificial Sequence
  Cyclic GFR-binding peptide
DSSNNVISMEGIVKPTRGVMIQITINS

SEQ ID NO: 121016 - protein, 29 aa, Artificial Sequence
  Cyclic GFR-binding peptide
DSSNNVINSLQEFIPKKRVIEYYVVPLPE

SEQ ID NO: 121017 - protein, 27 aa, Artificial Sequence
  Cyclic GFR-binding peptide
DSSNNVIVQVEKVKPKRGVVKAIKVSR

SEQ ID NO: 121018 - protein, 27 aa, Artificial Sequence
  Cyclic GFR-binding peptide
DSSNNVIVQVEKVVKENEDVKAMKVSR

SEQ ID NO: 121019 - protein, 27 aa, Artificial Sequence
  Cyclic GFR-binding peptide
DSSNNVINSLQEVVKENEDYYVMPLPE

SEQ ID NO: 121020 - protein, 27 aa, Artificial Sequence
  Cyclic GFR-binding peptide
DSSNNVIVTAKKIVNSSDDIKRVQVPR

SEQ ID NO: 121021 - protein, 27 aa, Artificial Sequence
  Cyclic GFR-binding peptide
DSSNNVIVQVEKIKPTKGIVKAIKVSR

SEQ ID NO: 121022 - protein, 27 aa, Artificial Sequence
  Cyclic GFR-binding peptide
DSSNNVINSLQEIKPTKGIYYLITLPE

SEQ ID NO: 121023 - protein, 29 aa, Artificial Sequence
  Cyclic GFR-binding peptide
DSSNNVINSLQEFIPKKRVIEYYLVTLPE

SEQ ID NO: 121024 - protein, 27 aa, Artificial Sequence
  Cyclic GFR-binding peptide
DSSNNVIVQVEKIVNSSDDVKAVKVSR

SEQ ID NO: 121025 - protein, 27 aa, Artificial Sequence
  Cyclic GFR-binding peptide
DSSNNVINSLQEIVNSSDDYYLVTLPE

SEQ ID NO: 121026 - protein, 29 aa, Artificial Sequence
  Cyclic GFR-binding peptide
DSSNNVIVQVEKLKPKKRVYEVKAVKVSR

SEQ ID NO: 121027 - protein, 29 aa, Artificial Sequence
  Cyclic GFR-binding peptide
DSSNNVIVQVEKFIPKKRVIEVKAVKVSR

SEQ ID NO: 121028 - protein, 29 aa, Artificial Sequence
  Cyclic GFR-binding peptide
DSSNNVIVTAKKHQGQHPKIRIKRMQVPR

SEQ ID NO: 121029 - protein, 27 aa, Artificial Sequence
  Cyclic GFR-binding peptide
DSSNNVINSLQEVVKENEDYYLMTLPE

SEQ ID NO: 121030 - protein, 29 aa, Artificial Sequence
  Cyclic GFR-binding peptide
DSSNNVISMEGIFIPKKRVIEMIQVTINS

SEQ ID NO: 121031 - protein, 27 aa, Artificial Sequence
  Cyclic GFR-binding peptide
DSSNNVINSLQEVKPKRGVYYVIPLPE

SEQ ID NO: 121032 - protein, 27 aa, Artificial Sequence
  Cyclic GFR-binding peptide
DSSNNVIVTAKKVKPKRGVIKRIQVPR

SEQ ID NO: 121033 - protein, 27 aa, Artificial Sequence
  Cyclic GFR-binding peptide
DSSNNVINSLQEVKPTRGVYYLITLPE

SEQ ID NO: 121034 - protein, 27 aa, Artificial Sequence
  Cyclic GFR-binding peptide
DSSNNVIVQVEKVKPTRGVVKAIKVSR

SEQ ID NO: 121035 - protein, 29 aa, Artificial Sequence
  Cyclic GFR-binding peptide
DSSNNVISMEGILKPKKRVYEMIQVTINS

SEQ ID NO: 121036 - protein, 27 aa, Artificial Sequence
  Cyclic GFR-binding peptide
DSSNNVINSLQEVVKDYEDYYVMPLPE

SEQ ID NO: 121037 - protein, 27 aa, Artificial Sequence
  Cyclic GFR-binding peptide
DSSNNVIVTAKKVKPTRGVIKRIQVPR

SEQ ID NO: 121038 - protein, 29 aa, Artificial Sequence
  Cyclic GFR-binding peptide
DSSNNVINSLQELKPKKRVYEYYLVTLPE

SEQ ID NO: 121039 - protein, 27 aa, Artificial Sequence
  Cyclic GFR-binding peptide
DSSNNVISMEGIVKPKRGVMIQITINS

SEQ ID NO: 121040 - protein, 27 aa, Artificial Sequence
  Cyclic GFR-binding peptide
DSSNNVISMEGIVVKENEDMIQMTINS

SEQ ID NO: 121041 - protein, 27 aa, Artificial Sequence
  Cyclic GFR-binding peptide
DSSNNVISMEGIIKPTKGIMIQITINS

SEQ ID NO: 121042 - protein, 29 aa, Artificial Sequence
  Cyclic GFR-binding peptide
DSSNNVINSLQEHQGQHPKIRYYLMTLPE

SEQ ID NO: 121043 - protein, 27 aa, Artificial Sequence
  Cyclic GFR-binding peptide
DSSNNVIVTAKKVVKDYEDIKRMQVPR

SEQ ID NO: 121044 - protein, 29 aa, Artificial Sequence
  Cyclic GFR-binding peptide
DSSNNVINSLQEHQGQHPKIRYYVMPLPE

SEQ ID NO: 121045 - protein, 29 aa, Artificial Sequence
  Cyclic GFR-binding peptide
DSSNNVINSLQELKPKKRVYEYYVVPLPE

SEQ ID NO: 121046 - protein, 29 aa, Artificial Sequence
  Cyclic GFR-binding peptide
DSSNNVIVTAKKFIPKKRVIEIKRVQVPR

SEQ ID NO: 121047 - protein, 27 aa, Artificial Sequence
  Cyclic GFR-binding peptide
DSSNNVIVQVEKVVKDYEDVKAMKVSR

SEQ ID NO: 121048 - protein, 27 aa, Artificial Sequence
  Cyclic GFR-binding peptide
EPLTMLYYDEYDKVVEQLSNDSSNNVI

SEQ ID NO: 121049 - protein, 27 aa, Artificial Sequence
  Cyclic GFR-binding peptide
EPLPIVYYIGKTPKIEQLSNDSSNNVI

SEQ ID NO: 121050 - protein, 27 aa, Artificial Sequence
  Cyclic GFR-binding peptide
SNITVQIMDDSSNVIIGEMSDSSNNVI

SEQ ID NO: 121051 - protein, 27 aa, Artificial Sequence
  Cyclic GFR-binding peptide
EPLTILYYVGRKPKVEQLSNDSSNNVI

SEQ ID NO: 121052 - protein, 27 aa, Artificial Sequence
  Cyclic GFR-binding peptide
EPLPIVYYVGRTPKVEQLSNDSSNNVI

SEQ ID NO: 121053 - protein, 27 aa, Artificial Sequence
  Cyclic GFR-binding peptide
RPVQMRKIDENEKVVKKATVDSSNNVI

SEQ ID NO: 121054 - protein, 27 aa, Artificial Sequence
  Cyclic GFR-binding peptide
EPLPVVYYDDSSNVIEQLSNDSSNNVI

SEQ ID NO: 121055 - protein, 29 aa, Artificial Sequence
  Cyclic GFR-binding peptide
SNITMQIMRIKPHQGQHIGEMSDSSNNVI

SEQ ID NO: 121056 - protein, 29 aa, Artificial Sequence
  Cyclic GFR-binding peptide
RPVQVRKIEYVRKKPKLKKATVDSSNNVI

SEQ ID NO: 121057 - protein, 27 aa, Artificial Sequence
  Cyclic GFR-binding peptide
SNITMQIMDEYDKVVIGEMSDSSNNVI

SEQ ID NO: 121058 - protein, 29 aa, Artificial Sequence
  Cyclic GFR-binding peptide
RSVKMAKVRIKPHQGQHKEVQVDSSNNVI

SEQ ID NO: 121059 - protein, 27 aa, Artificial Sequence
  Cyclic GFR-binding peptide
RPVQIRKIIGKTPKIKKATVDSSNNVI

SEQ ID NO: 121060 - protein, 27 aa, Artificial Sequence
  Cyclic GFR-binding peptide
SNITIQIMVGRTPKVIGEMSDSSNNVI

SEQ ID NO: 121061 - protein, 29 aa, Artificial Sequence
  Cyclic GFR-binding peptide
EPLPVVYYEIVRKKPIFEQLSNDSSNNVI

SEQ ID NO: 121062 - protein, 27 aa, Artificial Sequence
  Cyclic GFR-binding peptide
RSVKIAKVVGRKPKVKEVQVDSSNNVI

SEQ ID NO: 121063 - protein, 27 aa, Artificial Sequence
  Cyclic GFR-binding peptide
RSVKMAKVDENEKVVKEVQVDSSNNVI

SEQ ID NO: 121064 - protein, 27 aa, Artificial Sequence
  Cyclic GFR-binding peptide
EPLPMVYYDENEKVVEQLSNDSSNNVI

SEQ ID NO: 121065 - protein, 27 aa, Artificial Sequence
  Cyclic GFR-binding peptide
RPVQVRKIDDSSNVIKKATVDSSNNVI

SEQ ID NO: 121066 - protein, 27 aa, Artificial Sequence
  Cyclic GFR-binding peptide
RSVKIAKVIGKTPKIKEVQVDSSNNVI

SEQ ID NO: 121067 - protein, 27 aa, Artificial Sequence
  Cyclic GFR-binding peptide
EPLTILYYIGKTPKIEQLSNDSSNNVI

SEQ ID NO: 121068 - protein, 29 aa, Artificial Sequence
  Cyclic GFR-binding peptide
EPLTVLYYEIVRKKPIFEQLSNDSSNNVI

SEQ ID NO: 121069 - protein, 27 aa, Artificial Sequence
  Cyclic GFR-binding peptide
RSVKVAKVDDSSNVIKEVQVDSSNNVI

SEQ ID NO: 121070 - protein, 27 aa, Artificial Sequence
  Cyclic GFR-binding peptide
EPLTVLYYDDSSNVIEQLSNDSSNNVI

SEQ ID NO: 121071 - protein, 29 aa, Artificial Sequence
  Cyclic GFR-binding peptide
RSVKVAKVEYVRKKPKLKEVQVDSSNNVI

SEQ ID NO: 121072 - protein, 29 aa, Artificial Sequence
  Cyclic GFR-binding peptide
RSVKVAKVEIVRKKPIFKEVQVDSSNNVI

SEQ ID NO: 121073 - protein, 29 aa, Artificial Sequence
  Cyclic GFR-binding peptide
RPVQMRKIRIKPHQGQHKKATVDSSNNVI

SEQ ID NO: 121074 - protein, 27 aa, Artificial Sequence
  Cyclic GFR-binding peptide
EPLTMLYYDENEKVVEQLSNDSSNNVI

SEQ ID NO: 121075 - protein, 29 aa, Artificial Sequence
  Cyclic GFR-binding peptide
SNITVQIMEIVRKKPIFIGEMSDSSNNVI

SEQ ID NO: 121076 - protein, 27 aa, Artificial Sequence
  Cyclic GFR-binding peptide
EPLPIVYYVGRKPKVEQLSNDSSNNVI

SEQ ID NO: 121077 - protein, 27 aa, Artificial Sequence
  Cyclic GFR-binding peptide
RPVQIRKIVGRKPKVKKATVDSSNNVI

SEQ ID NO: 121078 - protein, 27 aa, Artificial Sequence
  Cyclic GFR-binding peptide
EPLTILYYVGRTPKVEQLSNDSSNNVI

SEQ ID NO: 121079 - protein, 27 aa, Artificial Sequence
  Cyclic GFR-binding peptide
RSVKIAKVVGRTPKVKEVQVDSSNNVI

SEQ ID NO: 121080 - protein, 29 aa, Artificial Sequence
  Cyclic GFR-binding peptide
SNITVQIMEYVRKKPKLIGEMSDSSNNVI

SEQ ID NO: 121081 - protein, 27 aa, Artificial Sequence
  Cyclic GFR-binding peptide
EPLPMVYYDEYDKVVEQLSNDSSNNVI

SEQ ID NO: 121082 - protein, 27 aa, Artificial Sequence
  Cyclic GFR-binding peptide
RPVQIRKIVGRTPKVKKATVDSSNNVI

SEQ ID NO: 121083 - protein, 29 aa, Artificial Sequence
  Cyclic GFR-binding peptide
EPLTVLYYEYVRKKPKLEQLSNDSSNNVI

SEQ ID NO: 121084 - protein, 27 aa, Artificial Sequence
  Cyclic GFR-binding peptide
SNITIQIMVGRKPKVIGEMSDSSNNVI

SEQ ID NO: 121085 - protein, 27 aa, Artificial Sequence
  Cyclic GFR-binding peptide
SNITMQIMDENEKVVIGEMSDSSNNVI

SEQ ID NO: 121086 - protein, 27 aa, Artificial Sequence
  Cyclic GFR-binding peptide
SNITIQIMIGKTPKIIGEMSDSSNNVI

SEQ ID NO: 121087 - protein, 29 aa, Artificial Sequence
  Cyclic GFR-binding peptide
EPLTMLYYRIKPHQGQHEQLSNDSSNNVI

SEQ ID NO: 121088 - protein, 27 aa, Artificial Sequence
  Cyclic GFR-binding peptide
RPVQMRKIDEYDKVVKKATVDSSNNVI

SEQ ID NO: 121089 - protein, 29 aa, Artificial Sequence
  Cyclic GFR-binding peptide
EPLPMVYYRIKPHQGQHEQLSNDSSNNVI

SEQ ID NO: 121090 - protein, 29 aa, Artificial Sequence
  Cyclic GFR-binding peptide
EPLPVVYYEYVRKKPKLEQLSNDSSNNVI

SEQ ID NO: 121091 - protein, 29 aa, Artificial Sequence
  Cyclic GFR-binding peptide
RPVQVRKIEIVRKKPIFKKATVDSSNNVI

SEQ ID NO: 121092 - protein, 27 aa, Artificial Sequence
  Cyclic GFR-binding peptide
RSVKMAKVDEYDKVVKEVQVDSSNNVI

SEQ ID NO: 121093 - protein, 27 aa, Artificial Sequence
  Cyclic GFR-binding peptide
DSSNNVIRYKKLIIQQKDNFYLMSIAN

SEQ ID NO: 121094 - protein, 27 aa, Artificial Sequence
  Cyclic GFR-binding peptide
DSSNNVIRYKKLIVNNSSDFYLVSIAN

SEQ ID NO: 121095 - protein, 27 aa, Artificial Sequence
  Cyclic GFR-binding peptide
DSSNNVIRYKKLYTVVGKDFYLISIAN

SEQ ID NO: 121096 - protein, 27 aa, Artificial Sequence
  Cyclic GFR-binding peptide
DSSNNVIRYKKLIVNSSDDFYLVSIAN

SEQ ID NO: 121097 - protein, 27 aa, Artificial Sequence
  Cyclic GFR-binding peptide
DSSNNVIRYKKLVVKDYEDFYLMSIAN

SEQ ID NO: 121098 - protein, 27 aa, Artificial Sequence
  Cyclic GFR-binding peptide
DSSNNVIRYKKLLLVRGNDFYLMSIAN

SEQ ID NO: 121099 - protein, 27 aa, Artificial Sequence
  Cyclic GFR-binding peptide
DSSNNVIRYKKLVVKENEDFYLMSIAN

SEQ ID NO: 121100 - protein, 27 aa, Artificial Sequence
  Cyclic GFR-binding peptide
DSSNNVIRYKKLVVNNAADFYLISIAN

SEQ ID NO: 121101 - protein, 27 aa, Artificial Sequence
  Cyclic GFR-binding peptide
DSSNNVIRYKKLTPVGMDDFYLVSIAN

SEQ ID NO: 121102 - protein, 27 aa, Artificial Sequence
  Cyclic GFR-binding peptide
DSSNNVIRYKKLVVNNASDFYLISIAN

SEQ ID NO: 121103 - protein, 27 aa, Artificial Sequence
  Cyclic GFR-binding peptide
NAISMLYFNDKQQIILKKYRDSSNNVI

SEQ ID NO: 121104 - protein, 27 aa, Artificial Sequence
  Cyclic GFR-binding peptide
NAISVLYFDSSNNVILKKYRDSSNNVI

SEQ ID NO: 121105 - protein, 27 aa, Artificial Sequence
  Cyclic GFR-binding peptide
NAISILYFDKGVVTYLKKYRDSSNNVI

SEQ ID NO: 121106 - protein, 27 aa, Artificial Sequence
  Cyclic GFR-binding peptide
NAISVLYFDDSSNVILKKYRDSSNNVI

SEQ ID NO: 121107 - protein, 27 aa, Artificial Sequence
  Cyclic GFR-binding peptide
NAISMLYFDEYDKVVLKKYRDSSNNVI

SEQ ID NO: 121108 - protein, 27 aa, Artificial Sequence
  Cyclic GFR-binding peptide
NAISMLYFDNGRVLLLKKYRDSSNNVI

SEQ ID NO: 121109 - protein, 27 aa, Artificial Sequence
  Cyclic GFR-binding peptide
NAISMLYFDENEKVVLKKYRDSSNNVI

SEQ ID NO: 121110 - protein, 27 aa, Artificial Sequence
  Cyclic GFR-binding peptide
NAISILYFDAANNVVLKKYRDSSNNVI

SEQ ID NO: 121111 - protein, 27 aa, Artificial Sequence
  Cyclic GFR-binding peptide
NAISVLYFDDMGVPTLKKYRDSSNNVI

SEQ ID NO: 121112 - protein, 27 aa, Artificial Sequence
  Cyclic GFR-binding peptide
NAISILYFDSANNVVLKKYRDSSNNVI

SEQ ID NO: 121113 - protein, 27 aa, Artificial Sequence
  Cyclic GFR-binding peptide
DSSNNVIEYKFKVKPTRGVLYLISIPE

SEQ ID NO: 121114 - protein, 27 aa, Artificial Sequence
  Cyclic GFR-binding peptide
DSSNNVIYHYKLVVKDYEDKYLMSIPS

SEQ ID NO: 121115 - protein, 27 aa, Artificial Sequence
  Cyclic GFR-binding peptide
DSSNNVIEYKFKTPVGMDDLYLVSIPE

SEQ ID NO: 121116 - protein, 27 aa, Artificial Sequence
  Cyclic GFR-binding peptide
DSSNNVIRYKKLVVKDYEDFYLMSIAN

SEQ ID NO: 121117 - protein, 27 aa, Artificial Sequence
  Cyclic GFR-binding peptide
DSSNNVIRHKRLVKPKRGVYYLISTAS

SEQ ID NO: 121118 - protein, 27 aa, Artificial Sequence
  Cyclic GFR-binding peptide
DSSNNVIYHYKLVKPKRGVKYLISIPS

SEQ ID NO: 121119 - protein, 27 aa, Artificial Sequence
  Cyclic GFR-binding peptide
DSSNNVIEYKFKIKPTKGILYLISIPE

SEQ ID NO: 121120 - protein, 27 aa, Artificial Sequence
  Cyclic GFR-binding peptide
DSSNNVIEYKFKVVNKNEDLYLISIPE

SEQ ID NO: 121121 - protein, 27 aa, Artificial Sequence
  Cyclic GFR-binding peptide
DSSNNVIPIKGYVKPTRGVFYLINIPS

SEQ ID NO: 121122 - protein, 27 aa, Artificial Sequence
  Cyclic GFR-binding peptide
DSSNNVIPIKGYVVKENEDFYLMNIPS

SEQ ID NO: 121123 - protein, 27 aa, Artificial Sequence
  Cyclic GFR-binding peptide
DSSNNVIYHYKLYTVVGKDKYLISIPS

SEQ ID NO: 121124 - protein, 27 aa, Artificial Sequence
  Cyclic GFR-binding peptide
DSSNNVIEYKFKLLVRGNDLYLMSIPE

SEQ ID NO: 121125 - protein, 27 aa, Artificial Sequence
  Cyclic GFR-binding peptide
DSSNNVIRYKKLVKPKRGVFYLISIAN

SEQ ID NO: 121126 - protein, 27 aa, Artificial Sequence
  Cyclic GFR-binding peptide
DSSNNVIPIKGYTPVGMDDFYLVNIPS

SEQ ID NO: 121127 - protein, 27 aa, Artificial Sequence
  Cyclic GFR-binding peptide
DSSNNVIYHYKLVVNKNEDKYLISIPS

SEQ ID NO: 121128 - protein, 27 aa, Artificial Sequence
  Cyclic GFR-binding peptide
DSSNNVIYHYKLIVNSSDDKYLVSIPS

SEQ ID NO: 121129 - protein, 27 aa, Artificial Sequence
  Cyclic GFR-binding peptide
DSSNNVIPIKGYIVNSSDDFYLVNIPS

SEQ ID NO: 121130 - protein, 27 aa, Artificial Sequence
  Cyclic GFR-binding peptide
DSSNNVIRYKKLYTVVGKDFYLISIAN

SEQ ID NO: 121131 - protein, 27 aa, Artificial Sequence
  Cyclic GFR-binding peptide
DSSNNVIRHKRLLLVRGNDYYLMSTAS

SEQ ID NO: 121132 - protein, 27 aa, Artificial Sequence
  Cyclic GFR-binding peptide
DSSNNVIYHYKLLLVRGNDKYLMSIPS

SEQ ID NO: 121133 - protein, 27 aa, Artificial Sequence
  Cyclic GFR-binding peptide
DSSNNVIRYKKLIVNSSDDFYLVSIAN

SEQ ID NO: 121134 - protein, 27 aa, Artificial Sequence
  Cyclic GFR-binding peptide
DSSNNVIRHKRLVVNKNEDYYLISTAS

SEQ ID NO: 121135 - protein, 27 aa, Artificial Sequence
  Cyclic GFR-binding peptide
DSSNNVIRHKRLIKPTKGIYYLISTAS

SEQ ID NO: 121136 - protein, 27 aa, Artificial Sequence
  Cyclic GFR-binding peptide
DSSNNVIPIKGYYTVVGKDFYLINIPS

SEQ ID NO: 121137 - protein, 27 aa, Artificial Sequence
  Cyclic GFR-binding peptide
DSSNNVIYHYKLTPVGMDDKYLVSIPS

SEQ ID NO: 121138 - protein, 27 aa, Artificial Sequence
  Cyclic GFR-binding peptide
DSSNNVIRHKRLIVNNSSDYYLVSTAS

SEQ ID NO: 121139 - protein, 27 aa, Artificial Sequence
  Cyclic GFR-binding peptide
DSSNNVIRYKKLLLVRGNDFYLMSIAN

SEQ ID NO: 121140 - protein, 27 aa, Artificial Sequence
  Cyclic GFR-binding peptide
DSSNNVIYHYKLVKPTRGVKYLISIPS

SEQ ID NO: 121141 - protein, 27 aa, Artificial Sequence
  Cyclic GFR-binding peptide
DSSNNVIRHKRLIVNSSDDYYLVSTAS

SEQ ID NO: 121142 - protein, 27 aa, Artificial Sequence
  Cyclic GFR-binding peptide
DSSNNVIPIKGYLLVRGNDFYLMNIPS

SEQ ID NO: 121143 - protein, 27 aa, Artificial Sequence
  Cyclic GFR-binding peptide
DSSNNVIRYKKLVVNKNEDFYLISIAN

SEQ ID NO: 121144 - protein, 27 aa, Artificial Sequence
  Cyclic GFR-binding peptide
DSSNNVIEYKFKVVKDYEDLYLMSIPE

SEQ ID NO: 121145 - protein, 27 aa, Artificial Sequence
  Cyclic GFR-binding peptide
DSSNNVIPIKGYVVNKNEDFYLINIPS

SEQ ID NO: 121146 - protein, 27 aa, Artificial Sequence
  Cyclic GFR-binding peptide
DSSNNVIPIKGYIKPTKGIFYLINIPS

SEQ ID NO: 121147 - protein, 27 aa, Artificial Sequence
  Cyclic GFR-binding peptide
DSSNNVIEYKFKVVNNAADLYLISIPE

SEQ ID NO: 121148 - protein, 27 aa, Artificial Sequence
  Cyclic GFR-binding peptide
DSSNNVIRHKRLYTVVGKDYYLISTAS

SEQ ID NO: 121149 - protein, 27 aa, Artificial Sequence
  Cyclic GFR-binding peptide
DSSNNVIRYKKLIKPTKGIFYLISIAN

SEQ ID NO: 121150 - protein, 27 aa, Artificial Sequence
  Cyclic GFR-binding peptide
DSSNNVIPIKGYVVKDYEDFYLMNIPS

SEQ ID NO: 121151 - protein, 27 aa, Artificial Sequence
  Cyclic GFR-binding peptide
DSSNNVIEYKFKVVNNASDLYLISIPE

SEQ ID NO: 121152 - protein, 27 aa, Artificial Sequence
  Cyclic GFR-binding peptide
DSSNNVIRYKKLVKPTRGVFYLISIAN

SEQ ID NO: 121153 - protein, 27 aa, Artificial Sequence
  Cyclic GFR-binding peptide
DSSNNVIRHKRLVVKENEDYYLMSTAS

SEQ ID NO: 121154 - protein, 27 aa, Artificial Sequence
  Cyclic GFR-binding peptide
DSSNNVIYHYKLIKPTKGIKYLISIPS

SEQ ID NO: 121155 - protein, 27 aa, Artificial Sequence
  Cyclic GFR-binding peptide
DSSNNVIYHYKLVVKENEDKYLMSIPS

SEQ ID NO: 121156 - protein, 27 aa, Artificial Sequence
  Cyclic GFR-binding peptide
DSSNNVIRHKRLIIQQKDNYYLMSTAS

SEQ ID NO: 121157 - protein, 27 aa, Artificial Sequence
  Cyclic GFR-binding peptide
DSSNNVIRYKKLVVKENEDFYLMSIAN

SEQ ID NO: 121158 - protein, 27 aa, Artificial Sequence
  Cyclic GFR-binding peptide
DSSNNVIRYKKLVVNNAADFYLISIAN

SEQ ID NO: 121159 - protein, 27 aa, Artificial Sequence
  Cyclic GFR-binding peptide
DSSNNVIEYKFKIIQQKDNLYLMSIPE

SEQ ID NO: 121160 - protein, 27 aa, Artificial Sequence
  Cyclic GFR-binding peptide
DSSNNVIRYKKLTPVGMDDFYLVSIAN

SEQ ID NO: 121161 - protein, 27 aa, Artificial Sequence
  Cyclic GFR-binding peptide
DSSNNVIYHYKLVVNNAADKYLISIPS

SEQ ID NO: 121162 - protein, 27 aa, Artificial Sequence
  Cyclic GFR-binding peptide
DSSNNVIPIKGYIVNNSSDFYLVNIPS

SEQ ID NO: 121163 - protein, 27 aa, Artificial Sequence
  Cyclic GFR-binding peptide
DSSNNVIPIKGYVKPKRGVFYLINIPS

SEQ ID NO: 121164 - protein, 27 aa, Artificial Sequence
  Cyclic GFR-binding peptide
DSSNNVIRYKKLIIQQKDNFYLMSIAN

SEQ ID NO: 121165 - protein, 27 aa, Artificial Sequence
  Cyclic GFR-binding peptide
DSSNNVIPIKGYIIQQKDNFYLMNIPS

SEQ ID NO: 121166 - protein, 27 aa, Artificial Sequence
  Cyclic GFR-binding peptide
DSSNNVIRYKKLIVNNSSDFYLVSIAN

SEQ ID NO: 121167 - protein, 27 aa, Artificial Sequence
  Cyclic GFR-binding peptide
DSSNNVIPIKGYVVNNAADFYLINIPS

SEQ ID NO: 121168 - protein, 27 aa, Artificial Sequence
  Cyclic GFR-binding peptide
DSSNNVIRHKRLVKPTRGVYYLISTAS

SEQ ID NO: 121169 - protein, 27 aa, Artificial Sequence
  Cyclic GFR-binding peptide
DSSNNVIEYKFKIVNNSSDLYLVSIPE

SEQ ID NO: 121170 - protein, 27 aa, Artificial Sequence
  Cyclic GFR-binding peptide
DSSNNVIRHKRLVVNNASDYYLISTAS

SEQ ID NO: 121171 - protein, 27 aa, Artificial Sequence
  Cyclic GFR-binding peptide
DSSNNVIRHKRLTPVGMDDYYLVSTAS

SEQ ID NO: 121172 - protein, 27 aa, Artificial Sequence
  Cyclic GFR-binding peptide
DSSNNVIYHYKLIVNNSSDKYLVSIPS

SEQ ID NO: 121173 - protein, 27 aa, Artificial Sequence
  Cyclic GFR-binding peptide
DSSNNVIYHYKLVVNNASDKYLISIPS

SEQ ID NO: 121174 - protein, 27 aa, Artificial Sequence
  Cyclic GFR-binding peptide
DSSNNVIEYKFKIVNSSDDLYLVSIPE

SEQ ID NO: 121175 - protein, 27 aa, Artificial Sequence
  Cyclic GFR-binding peptide
DSSNNVIEYKFKVKPKRGVLYLISIPE

SEQ ID NO: 121176 - protein, 27 aa, Artificial Sequence
  Cyclic GFR-binding peptide
DSSNNVIRHKRLVVKDYEDYYLMSTAS

SEQ ID NO: 121177 - protein, 27 aa, Artificial Sequence
  Cyclic GFR-binding peptide
DSSNNVIEYKFKVVKENEDLYLMSIPE

SEQ ID NO: 121178 - protein, 27 aa, Artificial Sequence
  Cyclic GFR-binding peptide
DSSNNVIEYKFKYTVVGKDLYLISIPE

SEQ ID NO: 121179 - protein, 27 aa, Artificial Sequence
  Cyclic GFR-binding peptide
DSSNNVIPIKGYVVNNASDFYLINIPS

SEQ ID NO: 121180 - protein, 27 aa, Artificial Sequence
  Cyclic GFR-binding peptide
DSSNNVIYHYKLIIQQKDNKYLMSIPS

SEQ ID NO: 121181 - protein, 27 aa, Artificial Sequence
  Cyclic GFR-binding peptide
DSSNNVIRYKKLVVNNASDFYLISIAN

SEQ ID NO: 121182 - protein, 27 aa, Artificial Sequence
  Cyclic GFR-binding peptide
DSSNNVIRHKRLVVNNAADYYLISTAS

SEQ ID NO: 121183 - protein, 27 aa, Artificial Sequence
  Cyclic GFR-binding peptide
EPISILYLVGRTPKVKFKYEDSSNNVI

SEQ ID NO: 121184 - protein, 27 aa, Artificial Sequence
  Cyclic GFR-binding peptide
SPISMLYKDEYDKVVLKYHYDSSNNVI

SEQ ID NO: 121185 - protein, 27 aa, Artificial Sequence
  Cyclic GFR-binding peptide
EPISVLYLDDMGVPTKFKYEDSSNNVI

SEQ ID NO: 121186 - protein, 27 aa, Artificial Sequence
  Cyclic GFR-binding peptide
NAISMLYFDEYDKVVLKKYRDSSNNVI

SEQ ID NO: 121187 - protein, 27 aa, Artificial Sequence
  Cyclic GFR-binding peptide
SATSILYYVGRKPKVLRKHRDSSNNVI

SEQ ID NO: 121188 - protein, 27 aa, Artificial Sequence
  Cyclic GFR-binding peptide
SPISILYKVGRKPKVLKYHYDSSNNVI

SEQ ID NO: 121189 - protein, 27 aa, Artificial Sequence
  Cyclic GFR-binding peptide
EPISILYLIGKTPKIKFKYEDSSNNVI

SEQ ID NO: 121190 - protein, 27 aa, Artificial Sequence
  Cyclic GFR-binding peptide
EPISILYLDENKNVVKFKYEDSSNNVI

SEQ ID NO: 121191 - protein, 27 aa, Artificial Sequence
  Cyclic GFR-binding peptide
SPINILYFVGRTPKVYGKIPDSSNNVI

SEQ ID NO: 121192 - protein, 27 aa, Artificial Sequence
  Cyclic GFR-binding peptide
SPINMLYFDENEKVVYGKIPDSSNNVI

SEQ ID NO: 121193 - protein, 27 aa, Artificial Sequence
  Cyclic GFR-binding peptide
SPISILYKDKGVVTYLKYHYDSSNNVI

SEQ ID NO: 121194 - protein, 27 aa, Artificial Sequence
  Cyclic GFR-binding peptide
EPISMLYLDNGRVLLKFKYEDSSNNVI

SEQ ID NO: 121195 - protein, 27 aa, Artificial Sequence
  Cyclic GFR-binding peptide
NAISILYFVGRKPKVLKKYRDSSNNVI

SEQ ID NO: 121196 - protein, 27 aa, Artificial Sequence
  Cyclic GFR-binding peptide
SPINVLYFDDMGVPTYGKIPDSSNNVI

SEQ ID NO: 121197 - protein, 27 aa, Artificial Sequence
  Cyclic GFR-binding peptide
SPISILYKDENKNVVLKYHYDSSNNVI

SEQ ID NO: 121198 - protein, 27 aa, Artificial Sequence
  Cyclic GFR-binding peptide
SPISVLYKDDSSNVILKYHYDSSNNVI

SEQ ID NO: 121199 - protein, 27 aa, Artificial Sequence
  Cyclic GFR-binding peptide
SPINVLYFDDSSNVIYGKIPDSSNNVI

SEQ ID NO: 121200 - protein, 27 aa, Artificial Sequence
  Cyclic GFR-binding peptide
NAISILYFDKGVVTYLKKYRDSSNNVI

SEQ ID NO: 121201 - protein, 27 aa, Artificial Sequence
  Cyclic GFR-binding peptide
SATSMLYYDNGRVLLLRKHRDSSNNVI

SEQ ID NO: 121202 - protein, 27 aa, Artificial Sequence
  Cyclic GFR-binding peptide
SPISMLYKDNGRVLLLKYHYDSSNNVI

SEQ ID NO: 121203 - protein, 27 aa, Artificial Sequence
  Cyclic GFR-binding peptide
NAISVLYFDDSSNVILKKYRDSSNNVI

SEQ ID NO: 121204 - protein, 27 aa, Artificial Sequence
  Cyclic GFR-binding peptide
SATSILYYDENKNVVLRKHRDSSNNVI

SEQ ID NO: 121205 - protein, 27 aa, Artificial Sequence
  Cyclic GFR-binding peptide
SATSILYYIGKTPKILRKHRDSSNNVI

SEQ ID NO: 121206 - protein, 27 aa, Artificial Sequence
  Cyclic GFR-binding peptide
SPINILYFDKGVVTYYGKIPDSSNNVI

SEQ ID NO: 121207 - protein, 27 aa, Artificial Sequence
  Cyclic GFR-binding peptide
SPISVLYKDDMGVPTLKYHYDSSNNVI

SEQ ID NO: 121208 - protein, 27 aa, Artificial Sequence
  Cyclic GFR-binding peptide
SATSVLYYDSSNNVILRKHRDSSNNVI

SEQ ID NO: 121209 - protein, 27 aa, Artificial Sequence
  Cyclic GFR-binding peptide
NAISMLYFDNGRVLLLKKYRDSSNNVI

SEQ ID NO: 121210 - protein, 27 aa, Artificial Sequence
  Cyclic GFR-binding peptide
SPISILYKVGRTPKVLKYHYDSSNNVI

SEQ ID NO: 121211 - protein, 27 aa, Artificial Sequence
  Cyclic GFR-binding peptide
SATSVLYYDDSSNVILRKHRDSSNNVI

SEQ ID NO: 121212 - protein, 27 aa, Artificial Sequence
  Cyclic GFR-binding peptide
SPINMLYFDNGRVLLYGKIPDSSNNVI

SEQ ID NO: 121213 - protein, 27 aa, Artificial Sequence
  Cyclic GFR-binding peptide
NAISILYFDENKNVVLKKYRDSSNNVI

SEQ ID NO: 121214 - protein, 27 aa, Artificial Sequence
  Cyclic GFR-binding peptide
EPISMLYLDEYDKVVKFKYEDSSNNVI

SEQ ID NO: 121215 - protein, 27 aa, Artificial Sequence
  Cyclic GFR-binding peptide
SPINILYFDENKNVVYGKIPDSSNNVI

SEQ ID NO: 121216 - protein, 27 aa, Artificial Sequence
  Cyclic GFR-binding peptide
SPINILYFIGKTPKIYGKIPDSSNNVI

SEQ ID NO: 121217 - protein, 27 aa, Artificial Sequence
  Cyclic GFR-binding peptide
EPISILYLDAANNVVKFKYEDSSNNVI

SEQ ID NO: 121218 - protein, 27 aa, Artificial Sequence
  Cyclic GFR-binding peptide
SATSILYYDKGVVTYLRKHRDSSNNVI

SEQ ID NO: 121219 - protein, 27 aa, Artificial Sequence
  Cyclic GFR-binding peptide
NAISILYFIGKTPKILKKYRDSSNNVI

SEQ ID NO: 121220 - protein, 27 aa, Artificial Sequence
  Cyclic GFR-binding peptide
SPINMLYFDEYDKVVYGKIPDSSNNVI

SEQ ID NO: 121221 - protein, 27 aa, Artificial Sequence
  Cyclic GFR-binding peptide
EPISILYLDSANNVVKFKYEDSSNNVI

SEQ ID NO: 121222 - protein, 27 aa, Artificial Sequence
  Cyclic GFR-binding peptide
NAISILYFVGRTPKVLKKYRDSSNNVI

SEQ ID NO: 121223 - protein, 27 aa, Artificial Sequence
  Cyclic GFR-binding peptide
SATSMLYYDENEKVVLRKHRDSSNNVI

SEQ ID NO: 121224 - protein, 27 aa, Artificial Sequence
  Cyclic GFR-binding peptide
SPISILYKIGKTPKILKYHYDSSNNVI

SEQ ID NO: 121225 - protein, 27 aa, Artificial Sequence
  Cyclic GFR-binding peptide
SPISMLYKDENEKVVLKYHYDSSNNVI

SEQ ID NO: 121226 - protein, 27 aa, Artificial Sequence
  Cyclic GFR-binding peptide
SATSMLYYNDKQQIILRKHRDSSNNVI

SEQ ID NO: 121227 - protein, 27 aa, Artificial Sequence
  Cyclic GFR-binding peptide
NAISMLYFDENEKVVLKKYRDSSNNVI

SEQ ID NO: 121228 - protein, 27 aa, Artificial Sequence
  Cyclic GFR-binding peptide
NAISILYFDAANNVVLKKYRDSSNNVI

SEQ ID NO: 121229 - protein, 27 aa, Artificial Sequence
  Cyclic GFR-binding peptide
EPISMLYLNDKQQIIKFKYEDSSNNVI

SEQ ID NO: 121230 - protein, 27 aa, Artificial Sequence
  Cyclic GFR-binding peptide
NAISVLYFDDMGVPTLKKYRDSSNNVI

SEQ ID NO: 121231 - protein, 27 aa, Artificial Sequence
  Cyclic GFR-binding peptide
SPISILYKDAANNVVLKYHYDSSNNVI

SEQ ID NO: 121232 - protein, 27 aa, Artificial Sequence
  Cyclic GFR-binding peptide
SPINVLYFDSSNNVIYGKIPDSSNNVI

SEQ ID NO: 121233 - protein, 27 aa, Artificial Sequence
  Cyclic GFR-binding peptide
SPINILYFVGRKPKVYGKIPDSSNNVI

SEQ ID NO: 121234 - protein, 27 aa, Artificial Sequence
  Cyclic GFR-binding peptide
NAISMLYFNDKQQIILKKYRDSSNNVI

SEQ ID NO: 121235 - protein, 27 aa, Artificial Sequence
  Cyclic GFR-binding peptide
SPINMLYFNDKQQIIYGKIPDSSNNVI

SEQ ID NO: 121236 - protein, 27 aa, Artificial Sequence
  Cyclic GFR-binding peptide
NAISVLYFDSSNNVILKKYRDSSNNVI

SEQ ID NO: 121237 - protein, 27 aa, Artificial Sequence
  Cyclic GFR-binding peptide
SPINILYFDAANNVVYGKIPDSSNNVI

SEQ ID NO: 121238 - protein, 27 aa, Artificial Sequence
  Cyclic GFR-binding peptide
SATSILYYVGRTPKVLRKHRDSSNNVI

SEQ ID NO: 121239 - protein, 27 aa, Artificial Sequence
  Cyclic GFR-binding peptide
EPISVLYLDSSNNVIKFKYEDSSNNVI

SEQ ID NO: 121240 - protein, 27 aa, Artificial Sequence
  Cyclic GFR-binding peptide
SATSILYYDSANNVVLRKHRDSSNNVI

SEQ ID NO: 121241 - protein, 27 aa, Artificial Sequence
  Cyclic GFR-binding peptide
SATSVLYYDDMGVPTLRKHRDSSNNVI

SEQ ID NO: 121242 - protein, 27 aa, Artificial Sequence
  Cyclic GFR-binding peptide
SPISVLYKDSSNNVILKYHYDSSNNVI

SEQ ID NO: 121243 - protein, 27 aa, Artificial Sequence
  Cyclic GFR-binding peptide
SPISILYKDSANNVVLKYHYDSSNNVI

SEQ ID NO: 121244 - protein, 27 aa, Artificial Sequence
  Cyclic GFR-binding peptide
EPISVLYLDDSSNVIKFKYEDSSNNVI

SEQ ID NO: 121245 - protein, 27 aa, Artificial Sequence
  Cyclic GFR-binding peptide
EPISILYLVGRKPKVKFKYEDSSNNVI

SEQ ID NO: 121246 - protein, 27 aa, Artificial Sequence
  Cyclic GFR-binding peptide
SATSMLYYDEYDKVVLRKHRDSSNNVI

SEQ ID NO: 121247 - protein, 27 aa, Artificial Sequence
  Cyclic GFR-binding peptide
EPISMLYLDENEKVVKFKYEDSSNNVI

SEQ ID NO: 121248 - protein, 27 aa, Artificial Sequence
  Cyclic GFR-binding peptide
EPISILYLDKGVVTYKFKYEDSSNNVI

SEQ ID NO: 121249 - protein, 27 aa, Artificial Sequence
  Cyclic GFR-binding peptide
SPINILYFDSANNVVYGKIPDSSNNVI

SEQ ID NO: 121250 - protein, 27 aa, Artificial Sequence
  Cyclic GFR-binding peptide
SPISMLYKNDKQQIILKYHYDSSNNVI

SEQ ID NO: 121251 - protein, 27 aa, Artificial Sequence
  Cyclic GFR-binding peptide
NAISILYFDSANNVVLKKYRDSSNNVI

SEQ ID NO: 121252 - protein, 27 aa, Artificial Sequence
  Cyclic GFR-binding peptide
SATSILYYDAANNVVLRKHRDSSNNVI

SEQ ID NO: 121253 - protein, 27 aa, Artificial Sequence
  Cyclic GFR-binding peptide
DSSNNVISMEGIIIQQKDNMIQMTINS

SEQ ID NO: 121254 - protein, 27 aa, Artificial Sequence
  Cyclic GFR-binding peptide
DSSNNVISMEGIIVNSSDDMIQVTINS

SEQ ID NO: 121255 - protein, 27 aa, Artificial Sequence
  Cyclic GFR-binding peptide
DSSNNVISMEGLVKPKRGVMIQITINS

SEQ ID NO: 121256 - protein, 27 aa, Artificial Sequence
  Cyclic GFR-binding peptide
DSSNNVISMEGLVVNNASDMIQITINS

SEQ ID NO: 121257 - protein, 29 aa, Artificial Sequence
  Cyclic GFR-binding peptide
DSSNNVISMEGIFIPKKRVIEMIQVTINS

SEQ ID NO: 121258 - protein, 27 aa, Artificial Sequence
  Cyclic GFR-binding peptide
DSSNNVISMEGILLVRGNDMIQMTINS

SEQ ID NO: 121259 - protein, 29 aa, Artificial Sequence
  Cyclic GFR-binding peptide
DSSNNVISMEGILKPKKRVYEMIQVTINS

SEQ ID NO: 121260 - protein, 27 aa, Artificial Sequence
  Cyclic GFR-binding peptide
DSSNNVISMEGLIKPTKGIMIQITINS

SEQ ID NO: 121261 - protein, 27 aa, Artificial Sequence
  Cyclic GFR-binding peptide
DSSNNVISMEGLIVNSSDDMIQVTINS

SEQ ID NO: 121262 - protein, 29 aa, Artificial Sequence
  Cyclic GFR-binding peptide
DSSNNVISMEGIHQGQHPKIRMIQMTINS

SEQ ID NO: 121263 - protein, 27 aa, Artificial Sequence
  Cyclic GFR-binding peptide
DSSNNVISMEGIVVNNASDMIQITINS

SEQ ID NO: 121264 - protein, 29 aa, Artificial Sequence
  Cyclic GFR-binding peptide
DSSNNVISMEGLLKPKKRVYEMIQVTINS

SEQ ID NO: 121265 - protein, 27 aa, Artificial Sequence
  Cyclic GFR-binding peptide
DSSNNVISMEGIVKPKRGVMIQITINS

SEQ ID NO: 121266 - protein, 27 aa, Artificial Sequence
  Cyclic GFR-binding peptide
DSSNNVISMEGIVKPTRGVMIQITINS

SEQ ID NO: 121267 - protein, 27 aa, Artificial Sequence
  Cyclic GFR-binding peptide
DSSNNVISMEGLVVNNAADMIQITINS

SEQ ID NO: 121268 - protein, 27 aa, Artificial Sequence
  Cyclic GFR-binding peptide
DSSNNVISMEGLLLVRGNDMIQMTINS

SEQ ID NO: 121269 - protein, 27 aa, Artificial Sequence
  Cyclic GFR-binding peptide
DSSNNVISMEGIIKPTKGIMIQITINS

SEQ ID NO: 121270 - protein, 27 aa, Artificial Sequence
  Cyclic GFR-binding peptide
DSSNNVISMEGLIIQQKDNMIQMTINS

SEQ ID NO: 121271 - protein, 29 aa, Artificial Sequence
  Cyclic GFR-binding peptide
DSSNNVISMEGLHQGQHPKIRMIQMTINS

SEQ ID NO: 121272 - protein, 27 aa, Artificial Sequence
  Cyclic GFR-binding peptide
DSSNNVISMEGIVVNNAADMIQITINS

SEQ ID NO: 121273 - protein, 29 aa, Artificial Sequence
  Cyclic GFR-binding peptide
DSSNNVISMEGLFIPKKRVIEMIQVTINS

SEQ ID NO: 121274 - protein, 27 aa, Artificial Sequence
  Cyclic GFR-binding peptide
DSSNNVISMEGLVKPTRGVMIQITINS

SEQ ID NO: 121275 - protein, 27 aa, Artificial Sequence
  Cyclic GFR-binding peptide
SNITMQIMNDKQQIIIGEMSDSSNNVI

SEQ ID NO: 121276 - protein, 27 aa, Artificial Sequence
  Cyclic GFR-binding peptide
SNITVQIMDDSSNVIIGEMSDSSNNVI

SEQ ID NO: 121277 - protein, 27 aa, Artificial Sequence
  Cyclic GFR-binding peptide
SNITIQIMVGRKPKVLGEMSDSSNNVI

SEQ ID NO: 121278 - protein, 27 aa, Artificial Sequence
  Cyclic GFR-binding peptide
SNITIQIMDSANNVVLGEMSDSSNNVI

SEQ ID NO: 121279 - protein, 29 aa, Artificial Sequence
  Cyclic GFR-binding peptide
SNITVQIMEIVRKKPIFIGEMSDSSNNVI

SEQ ID NO: 121280 - protein, 27 aa, Artificial Sequence
  Cyclic GFR-binding peptide
SNITMQIMDNGRVLLIGEMSDSSNNVI

SEQ ID NO: 121281 - protein, 29 aa, Artificial Sequence
  Cyclic GFR-binding peptide
SNITVQIMEYVRKKPKLIGEMSDSSNNVI

SEQ ID NO: 121282 - protein, 27 aa, Artificial Sequence
  Cyclic GFR-binding peptide
SNITIQIMIGKTPKILGEMSDSSNNVI

SEQ ID NO: 121283 - protein, 27 aa, Artificial Sequence
  Cyclic GFR-binding peptide
SNITVQIMDDSSNVILGEMSDSSNNVI

SEQ ID NO: 121284 - protein, 29 aa, Artificial Sequence
  Cyclic GFR-binding peptide
SNITMQIMRIKPHQGQHIGEMSDSSNNVI

SEQ ID NO: 121285 - protein, 27 aa, Artificial Sequence
  Cyclic GFR-binding peptide
SNITIQIMDSANNVVIGEMSDSSNNVI

SEQ ID NO: 121286 - protein, 29 aa, Artificial Sequence
  Cyclic GFR-binding peptide
SNITVQIMEYVRKKPKLLGEMSDSSNNVI

SEQ ID NO: 121287 - protein, 27 aa, Artificial Sequence
  Cyclic GFR-binding peptide
SNITIQIMVGRKPKVIGEMSDSSNNVI

SEQ ID NO: 121288 - protein, 27 aa, Artificial Sequence
  Cyclic GFR-binding peptide
SNITIQIMVGRTPKVIGEMSDSSNNVI

SEQ ID NO: 121289 - protein, 27 aa, Artificial Sequence
  Cyclic GFR-binding peptide
SNITIQIMDAANNVVLGEMSDSSNNVI

SEQ ID NO: 121290 - protein, 27 aa, Artificial Sequence
  Cyclic GFR-binding peptide
SNITMQIMDNGRVLLLGEMSDSSNNVI

SEQ ID NO: 121291 - protein, 27 aa, Artificial Sequence
  Cyclic GFR-binding peptide
SNITIQIMIGKTPKIIGEMSDSSNNVI

SEQ ID NO: 121292 - protein, 27 aa, Artificial Sequence
  Cyclic GFR-binding peptide
SNITMQIMNDKQQIILGEMSDSSNNVI

SEQ ID NO: 121293 - protein, 29 aa, Artificial Sequence
  Cyclic GFR-binding peptide
SNITMQIMRIKPHQGQHLGEMSDSSNNVI

SEQ ID NO: 121294 - protein, 27 aa, Artificial Sequence
  Cyclic GFR-binding peptide
SNITIQIMDAANNVVIGEMSDSSNNVI

SEQ ID NO: 121295 - protein, 29 aa, Artificial Sequence
  Cyclic GFR-binding peptide
SNITVQIMEIVRKKPIFLGEMSDSSNNVI

SEQ ID NO: 121296 - protein, 27 aa, Artificial Sequence
  Cyclic GFR-binding peptide
SNITIQIMVGRTPKVLGEMSDSSNNVI

SEQ ID NO: 121297 - protein, 27 aa, Artificial Sequence
  Cyclic GFR-binding peptide
DSSNNVIRYKKLIKPTKGIFYLISIAN

SEQ ID NO: 121298 - protein, 27 aa, Artificial Sequence
  Cyclic GFR-binding peptide
DSSNNVIQYNKLVVNKNEDLYLISIAS

SEQ ID NO: 121299 - protein, 27 aa, Artificial Sequence
  Cyclic GFR-binding peptide
DSSNNVIQYNKLVVNNAADLYLISIAS

SEQ ID NO: 121300 - protein, 27 aa, Artificial Sequence
  Cyclic GFR-binding peptide
DSSNNVIQYNKLIVNNSSDLYLVSIAS

SEQ ID NO: 121301 - protein, 27 aa, Artificial Sequence
  Cyclic GFR-binding peptide
DSSNNVIRYKKLVVKDYEDFYLMSIAN

SEQ ID NO: 121302 - protein, 27 aa, Artificial Sequence
  Cyclic GFR-binding peptide
DSSNNVIRYKKLVKPTRGVFYLISIAN

SEQ ID NO: 121303 - protein, 27 aa, Artificial Sequence
  Cyclic GFR-binding peptide
DSSNNVIQYNKLIIQQKDNLYLMSIAS

SEQ ID NO: 121304 - protein, 27 aa, Artificial Sequence
  Cyclic GFR-binding peptide
DSSNNVIQYNKLLLVRGNDLYLMSIAS

SEQ ID NO: 121305 - protein, 27 aa, Artificial Sequence
  Cyclic GFR-binding peptide
DSSNNVIQYNKLVKPTRGVLYLISIAS

SEQ ID NO: 121306 - protein, 27 aa, Artificial Sequence
  Cyclic GFR-binding peptide
DSSNNVIRYKKLVVKENEDFYLMSIAN

SEQ ID NO: 121307 - protein, 27 aa, Artificial Sequence
  Cyclic GFR-binding peptide
DSSNNVIRYKKLVVNNAADFYLISIAN

SEQ ID NO: 121308 - protein, 27 aa, Artificial Sequence
  Cyclic GFR-binding peptide
DSSNNVIQYNKLTPVGMDDLYLVSIAS

SEQ ID NO: 121309 - protein, 27 aa, Artificial Sequence
  Cyclic GFR-binding peptide
DSSNNVIRYKKLTPVGMDDFYLVSIAN

SEQ ID NO: 121310 - protein, 27 aa, Artificial Sequence
  Cyclic GFR-binding peptide
DSSNNVIRYKKLVKPKRGVFYLISIAN

SEQ ID NO: 121311 - protein, 27 aa, Artificial Sequence
  Cyclic GFR-binding peptide
DSSNNVIQYNKLVVKENEDLYLMSIAS

SEQ ID NO: 121312 - protein, 27 aa, Artificial Sequence
  Cyclic GFR-binding peptide
DSSNNVIRYKKLIIQQKDNFYLMSIAN

SEQ ID NO: 121313 - protein, 27 aa, Artificial Sequence
  Cyclic GFR-binding peptide
DSSNNVIQYNKLVKPKRGVLYLISIAS

SEQ ID NO: 121314 - protein, 27 aa, Artificial Sequence
  Cyclic GFR-binding peptide
DSSNNVIRYKKLIVNNSSDFYLVSIAN

SEQ ID NO: 121315 - protein, 27 aa, Artificial Sequence
  Cyclic GFR-binding peptide
DSSNNVIRYKKLYTVVGKDFYLISIAN

SEQ ID NO: 121316 - protein, 27 aa, Artificial Sequence
  Cyclic GFR-binding peptide
DSSNNVIRYKKLIVNSSDDFYLVSIAN

SEQ ID NO: 121317 - protein, 27 aa, Artificial Sequence
  Cyclic GFR-binding peptide
DSSNNVIRYKKLLLVRGNDFYLMSIAN

SEQ ID NO: 121318 - protein, 27 aa, Artificial Sequence
  Cyclic GFR-binding peptide
DSSNNVIQYNKLVVNNASDLYLISIAS

SEQ ID NO: 121319 - protein, 27 aa, Artificial Sequence
  Cyclic GFR-binding peptide
DSSNNVIQYNKLIKPTKGILYLISIAS

SEQ ID NO: 121320 - protein, 27 aa, Artificial Sequence
  Cyclic GFR-binding peptide
DSSNNVIRYKKLVVNKNEDFYLISIAN

SEQ ID NO: 121321 - protein, 27 aa, Artificial Sequence
  Cyclic GFR-binding peptide
DSSNNVIQYNKLYTVVGKDLYLISIAS

SEQ ID NO: 121322 - protein, 27 aa, Artificial Sequence
  Cyclic GFR-binding peptide
DSSNNVIQYNKLVVKDYEDLYLMSIAS

SEQ ID NO: 121323 - protein, 27 aa, Artificial Sequence
  Cyclic GFR-binding peptide
DSSNNVIRYKKLVVNNASDFYLISIAN

SEQ ID NO: 121324 - protein, 27 aa, Artificial Sequence
  Cyclic GFR-binding peptide
DSSNNVIQYNKLIVNSSDDLYLVSIAS

SEQ ID NO: 121325 - protein, 27 aa, Artificial Sequence
  Cyclic GFR-binding peptide
NAISILYFIGKTPKILKKYRDSSNNVI

SEQ ID NO: 121326 - protein, 27 aa, Artificial Sequence
  Cyclic GFR-binding peptide
SAISILYLDENKNVVLKNYQDSSNNVI

SEQ ID NO: 121327 - protein, 27 aa, Artificial Sequence
  Cyclic GFR-binding peptide
SAISILYLDAANNVVLKNYQDSSNNVI

SEQ ID NO: 121328 - protein, 27 aa, Artificial Sequence
  Cyclic GFR-binding peptide
SAISVLYLDSSNNVILKNYQDSSNNVI

SEQ ID NO: 121329 - protein, 27 aa, Artificial Sequence
  Cyclic GFR-binding peptide
NAISMLYFDEYDKVVLKKYRDSSNNVI

SEQ ID NO: 121330 - protein, 27 aa, Artificial Sequence
  Cyclic GFR-binding peptide
NAISILYFVGRTPKVLKKYRDSSNNVI

SEQ ID NO: 121331 - protein, 27 aa, Artificial Sequence
  Cyclic GFR-binding peptide
SAISMLYLNDKQQIILKNYQDSSNNVI

SEQ ID NO: 121332 - protein, 27 aa, Artificial Sequence
  Cyclic GFR-binding peptide
SAISMLYLDNGRVLLLKNYQDSSNNVI

SEQ ID NO: 121333 - protein, 27 aa, Artificial Sequence
  Cyclic GFR-binding peptide
SAISILYLVGRTPKVLKNYQDSSNNVI

SEQ ID NO: 121334 - protein, 27 aa, Artificial Sequence
  Cyclic GFR-binding peptide
NAISMLYFDENEKVVLKKYRDSSNNVI

SEQ ID NO: 121335 - protein, 27 aa, Artificial Sequence
  Cyclic GFR-binding peptide
NAISILYFDAANNVVLKKYRDSSNNVI

SEQ ID NO: 121336 - protein, 27 aa, Artificial Sequence
  Cyclic GFR-binding peptide
SAISVLYLDDMGVPTLKNYQDSSNNVI

SEQ ID NO: 121337 - protein, 27 aa, Artificial Sequence
  Cyclic GFR-binding peptide
NAISVLYFDDMGVPTLKKYRDSSNNVI

SEQ ID NO: 121338 - protein, 27 aa, Artificial Sequence
  Cyclic GFR-binding peptide
NAISILYFVGRKPKVLKKYRDSSNNVI

SEQ ID NO: 121339 - protein, 27 aa, Artificial Sequence
  Cyclic GFR-binding peptide
SAISMLYLDENEKVVLKNYQDSSNNVI

SEQ ID NO: 121340 - protein, 27 aa, Artificial Sequence
  Cyclic GFR-binding peptide
NAISMLYFNDKQQIILKKYRDSSNNVI

SEQ ID NO: 121341 - protein, 27 aa, Artificial Sequence
  Cyclic GFR-binding peptide
SAISILYLVGRKPKVLKNYQDSSNNVI

SEQ ID NO: 121342 - protein, 27 aa, Artificial Sequence
  Cyclic GFR-binding peptide
NAISVLYFDSSNNVILKKYRDSSNNVI

SEQ ID NO: 121343 - protein, 27 aa, Artificial Sequence
  Cyclic GFR-binding peptide
NAISILYFDKGVVTYLKKYRDSSNNVI

SEQ ID NO: 121344 - protein, 27 aa, Artificial Sequence
  Cyclic GFR-binding peptide
NAISVLYFDDSSNVILKKYRDSSNNVI

SEQ ID NO: 121345 - protein, 27 aa, Artificial Sequence
  Cyclic GFR-binding peptide
NAISMLYFDNGRVLLLKKYRDSSNNVI

SEQ ID NO: 121346 - protein, 27 aa, Artificial Sequence
  Cyclic GFR-binding peptide
SAISILYLDSANNVVLKNYQDSSNNVI

SEQ ID NO: 121347 - protein, 27 aa, Artificial Sequence
  Cyclic GFR-binding peptide
SAISILYLIGKTPKILKNYQDSSNNVI

SEQ ID NO: 121348 - protein, 27 aa, Artificial Sequence
  Cyclic GFR-binding peptide
NAISILYFDENKNVVLKKYRDSSNNVI

SEQ ID NO: 121349 - protein, 27 aa, Artificial Sequence
  Cyclic GFR-binding peptide
SAISILYLDKGVVTYLKNYQDSSNNVI

SEQ ID NO: 121350 - protein, 27 aa, Artificial Sequence
  Cyclic GFR-binding peptide
SAISMLYLDEYDKVVLKNYQDSSNNVI

SEQ ID NO: 121351 - protein, 27 aa, Artificial Sequence
  Cyclic GFR-binding peptide
NAISILYFDSANNVVLKKYRDSSNNVI

SEQ ID NO: 121352 - protein, 27 aa, Artificial Sequence
  Cyclic GFR-binding peptide
SAISVLYLDDSSNVILKNYQDSSNNVI

SEQ ID NO: 121353 - protein, 29 aa, Artificial Sequence
  Cyclic GFR-binding peptide
DSSNNVIVTAKKLKPKKRVYEIKRVQVPR

SEQ ID NO: 121354 - protein, 29 aa, Artificial Sequence
  Cyclic GFR-binding peptide
DSSNNVIVQVEKLKPKKRVYEVKAVKVSR

SEQ ID NO: 121355 - protein, 27 aa, Artificial Sequence
  Cyclic GFR-binding peptide
DSSNNVIVTAKKVKPTRGVIKRIQVPR

SEQ ID NO: 121356 - protein, 29 aa, Artificial Sequence
  Cyclic GFR-binding peptide
DSSNNVIVQVEKFIPKKRVIEVKAVKVSR

SEQ ID NO: 121357 - protein, 29 aa, Artificial Sequence
  Cyclic GFR-binding peptide
DSSNNVIVQVEKHQGQHPKIRVKAMKVSR

SEQ ID NO: 121358 - protein, 29 aa, Artificial Sequence
  Cyclic GFR-binding peptide
DSSNNVIVTAKKHQGQHPKIRIKRMQVPR

SEQ ID NO: 121359 - protein, 27 aa, Artificial Sequence
  Cyclic GFR-binding peptide
DSSNNVIVTAKKIKPTKGIIKRIQVPR

SEQ ID NO: 121360 - protein, 27 aa, Artificial Sequence
  Cyclic GFR-binding peptide
DSSNNVIVQVEKVKPKRGVVKAIKVSR

SEQ ID NO: 121361 - protein, 27 aa, Artificial Sequence
  Cyclic GFR-binding peptide
DSSNNVIVTAKKVKPKRGVIKRIQVPR

SEQ ID NO: 121362 - protein, 27 aa, Artificial Sequence
  Cyclic GFR-binding peptide
DSSNNVIVQVEKIKPTKGIVKAIKVSR

SEQ ID NO: 121363 - protein, 27 aa, Artificial Sequence
  Cyclic GFR-binding peptide
DSSNNVIVQVEKVKPTRGVVKAIKVSR

SEQ ID NO: 121364 - protein, 29 aa, Artificial Sequence
  Cyclic GFR-binding peptide
DSSNNVIVTAKKFIPKKRVIEIKRVQVPR

SEQ ID NO: 121365 - protein, 29 aa, Artificial Sequence
  Cyclic GFR-binding peptide
RPVQVRKIEYVRKKPKLKKATVDSSNNVI

SEQ ID NO: 121366 - protein, 29 aa, Artificial Sequence
  Cyclic GFR-binding peptide
RSVKVAKVEYVRKKPKLKEVQVDSSNNVI

SEQ ID NO: 121367 - protein, 27 aa, Artificial Sequence
  Cyclic GFR-binding peptide
RPVQIRKIVGRTPKVKKATVDSSNNVI

SEQ ID NO: 121368 - protein, 29 aa, Artificial Sequence
  Cyclic GFR-binding peptide
RSVKVAKVEIVRKKPIFKEVQVDSSNNVI

SEQ ID NO: 121369 - protein, 29 aa, Artificial Sequence
  Cyclic GFR-binding peptide
RSVKMAKVRIKPHQGQHKEVQVDSSNNVI

SEQ ID NO: 121370 - protein, 29 aa, Artificial Sequence
  Cyclic GFR-binding peptide
RPVQMRKIRIKPHQGQHKKATVDSSNNVI

SEQ ID NO: 121371 - protein, 27 aa, Artificial Sequence
  Cyclic GFR-binding peptide
RPVQIRKIIGKTPKIKKATVDSSNNVI

SEQ ID NO: 121372 - protein, 27 aa, Artificial Sequence
  Cyclic GFR-binding peptide
RSVKIAKVVGRKPKVKEVQVDSSNNVI

SEQ ID NO: 121373 - protein, 27 aa, Artificial Sequence
  Cyclic GFR-binding peptide
RPVQIRKIVGRKPKVKKATVDSSNNVI

SEQ ID NO: 121374 - protein, 27 aa, Artificial Sequence
  Cyclic GFR-binding peptide
RSVKIAKVIGKTPKIKEVQVDSSNNVI

SEQ ID NO: 121375 - protein, 27 aa, Artificial Sequence
  Cyclic GFR-binding peptide
RSVKIAKVVGRTPKVKEVQVDSSNNVI

SEQ ID NO: 121376 - protein, 29 aa, Artificial Sequence
  Cyclic GFR-binding peptide
RPVQVRKIEIVRKKPIFKKATVDSSNNVI

SEQ ID NO: 121377 - protein, 27 aa, Artificial Sequence
  Cyclic GFR-binding peptide
DDMGVPTRYKKLIKPTKGIFYLISIAN

SEQ ID NO: 121378 - protein, 29 aa, Artificial Sequence
  Cyclic GFR-binding peptide
DDMGVPTRHKRLFIPKKRVIEYYLVSTAS

SEQ ID NO: 121379 - protein, 27 aa, Artificial Sequence
  Cyclic GFR-binding peptide
DDMGVPTYHYKLVVKDYEDKYLMSIPS

SEQ ID NO: 121380 - protein, 27 aa, Artificial Sequence
  Cyclic GFR-binding peptide
DDMGVPTQYNKLIVNNSSDLYLVSIAS

SEQ ID NO: 121381 - protein, 27 aa, Artificial Sequence
  Cyclic GFR-binding peptide
DDMGVPTRYKKLVVKDYEDFYLMSIAN

SEQ ID NO: 121382 - protein, 27 aa, Artificial Sequence
  Cyclic GFR-binding peptide
DDMGVPTRYKKLVKPTRGVFYLISIAN

SEQ ID NO: 121383 - protein, 27 aa, Artificial Sequence
  Cyclic GFR-binding peptide
DDMGVPTRHKRLVVKENEDYYLMSTAS

SEQ ID NO: 121384 - protein, 27 aa, Artificial Sequence
  Cyclic GFR-binding peptide
DDMGVPTYHYKLIKPTKGIKYLISIPS

SEQ ID NO: 121385 - protein, 29 aa, Artificial Sequence
  Cyclic GFR-binding peptide
DDMGVPTRYKKLFIPKKRVIEFYLVSIAN

SEQ ID NO: 121386 - protein, 27 aa, Artificial Sequence
  Cyclic GFR-binding peptide
DDMGVPTYHYKLVVKENEDKYLMSIPS

SEQ ID NO: 121387 - protein, 27 aa, Artificial Sequence
  Cyclic GFR-binding peptide
DDMGVPTRHKRLVKPKRGVYYLISTAS

SEQ ID NO: 121388 - protein, 27 aa, Artificial Sequence
  Cyclic GFR-binding peptide
DDMGVPTYHYKLVKPKRGVKYLISIPS

SEQ ID NO: 121389 - protein, 29 aa, Artificial Sequence
  Cyclic GFR-binding peptide
DDMGVPTQYNKLFIPKKRVIELYLVSIAS

SEQ ID NO: 121390 - protein, 27 aa, Artificial Sequence
  Cyclic GFR-binding peptide
DDMGVPTQYNKLVKPTRGVLYLISIAS

SEQ ID NO: 121391 - protein, 27 aa, Artificial Sequence
  Cyclic GFR-binding peptide
DDMGVPTRYKKLVVKENEDFYLMSIAN

SEQ ID NO: 121392 - protein, 27 aa, Artificial Sequence
  Cyclic GFR-binding peptide
DDMGVPTQYNKLTPVGMDDLYLVSIAS

SEQ ID NO: 121393 - protein, 27 aa, Artificial Sequence
  Cyclic GFR-binding peptide
DDMGVPTRYKKLTPVGMDDFYLVSIAN

SEQ ID NO: 121394 - protein, 27 aa, Artificial Sequence
  Cyclic GFR-binding peptide
DDMGVPTRYKKLVKPKRGVFYLISIAN

SEQ ID NO: 121395 - protein, 27 aa, Artificial Sequence
  Cyclic GFR-binding peptide
DDMGVPTQYNKLVVKENEDLYLMSIAS

SEQ ID NO: 121396 - protein, 27 aa, Artificial Sequence
  Cyclic GFR-binding peptide
DDMGVPTYHYKLIVNSSDDKYLVSIPS

SEQ ID NO: 121397 - protein, 27 aa, Artificial Sequence
  Cyclic GFR-binding peptide
DDMGVPTQYNKLVKPKRGVLYLISIAS

SEQ ID NO: 121398 - protein, 27 aa, Artificial Sequence
  Cyclic GFR-binding peptide
DDMGVPTRYKKLIVNNSSDFYLVSIAN

SEQ ID NO: 121399 - protein, 27 aa, Artificial Sequence
  Cyclic GFR-binding peptide
DDMGVPTRYKKLIVNSSDDFYLVSIAN

SEQ ID NO: 121400 - protein, 27 aa, Artificial Sequence
  Cyclic GFR-binding peptide
DDMGVPTRHKRLVKPTRGVYYLISTAS

SEQ ID NO: 121401 - protein, 29 aa, Artificial Sequence
  Cyclic GFR-binding peptide
DDMGVPTYHYKLFIPKKRVIEKYLVSIPS

SEQ ID NO: 121402 - protein, 27 aa, Artificial Sequence
  Cyclic GFR-binding peptide
DDMGVPTRHKRLIKPTKGIYYLISTAS

SEQ ID NO: 121403 - protein, 27 aa, Artificial Sequence
  Cyclic GFR-binding peptide
DDMGVPTRHKRLTPVGMDDYYLVSTAS

SEQ ID NO: 121404 - protein, 27 aa, Artificial Sequence
  Cyclic GFR-binding peptide
DDMGVPTYHYKLTPVGMDDKYLVSIPS

SEQ ID NO: 121405 - protein, 27 aa, Artificial Sequence
  Cyclic GFR-binding peptide
DDMGVPTYHYKLIVNNSSDKYLVSIPS

SEQ ID NO: 121406 - protein, 27 aa, Artificial Sequence
  Cyclic GFR-binding peptide
DDMGVPTRHKRLIVNNSSDYYLVSTAS

SEQ ID NO: 121407 - protein, 27 aa, Artificial Sequence
  Cyclic GFR-binding peptide
DDMGVPTYHYKLVKPTRGVKYLISIPS

SEQ ID NO: 121408 - protein, 27 aa, Artificial Sequence
  Cyclic GFR-binding peptide
DDMGVPTRHKRLIVNSSDDYYLVSTAS

SEQ ID NO: 121409 - protein, 27 aa, Artificial Sequence
  Cyclic GFR-binding peptide
DDMGVPTRHKRLVVKDYEDYYLMSTAS

SEQ ID NO: 121410 - protein, 27 aa, Artificial Sequence
  Cyclic GFR-binding peptide
DDMGVPTQYNKLIKPTKGILYLISIAS

SEQ ID NO: 121411 - protein, 27 aa, Artificial Sequence
  Cyclic GFR-binding peptide
DDMGVPTQYNKLVVKDYEDLYLMSIAS

SEQ ID NO: 121412 - protein, 27 aa, Artificial Sequence
  Cyclic GFR-binding peptide
DDMGVPTQYNKLIVNSSDDLYLVSIAS

SEQ ID NO: 121413 - protein, 27 aa, Artificial Sequence
  Cyclic GFR-binding peptide
NAISILYFIGKTPKILKKYRDDMGVPT

SEQ ID NO: 121414 - protein, 29 aa, Artificial Sequence
  Cyclic GFR-binding peptide
SATSVLYYEIVRKKPIFLRKHRDDMGVPT

SEQ ID NO: 121415 - protein, 27 aa, Artificial Sequence
  Cyclic GFR-binding peptide
SPISMLYKDEYDKVVLKYHYDDMGVPT

SEQ ID NO: 121416 - protein, 27 aa, Artificial Sequence
  Cyclic GFR-binding peptide
SAISVLYLDSSNNVILKNYQDDMGVPT

SEQ ID NO: 121417 - protein, 27 aa, Artificial Sequence
  Cyclic GFR-binding peptide
NAISMLYFDEYDKVVLKKYRDDMGVPT

SEQ ID NO: 121418 - protein, 27 aa, Artificial Sequence
  Cyclic GFR-binding peptide
NAISILYFVGRTPKVLKKYRDDMGVPT

SEQ ID NO: 121419 - protein, 27 aa, Artificial Sequence
  Cyclic GFR-binding peptide
SATSMLYYDENEKVVLRKHRDDMGVPT

SEQ ID NO: 121420 - protein, 27 aa, Artificial Sequence
  Cyclic GFR-binding peptide
SPISILYKIGKTPKILKYHYDDMGVPT

SEQ ID NO: 121421 - protein, 29 aa, Artificial Sequence
  Cyclic GFR-binding peptide
NAISVLYFEIVRKKPIFLKKYRDDMGVPT

SEQ ID NO: 121422 - protein, 27 aa, Artificial Sequence
  Cyclic GFR-binding peptide
SPISMLYKDENEKVVLKYHYDDMGVPT

SEQ ID NO: 121423 - protein, 27 aa, Artificial Sequence
  Cyclic GFR-binding peptide
SATSILYYVGRKPKVLRKHRDDMGVPT

SEQ ID NO: 121424 - protein, 27 aa, Artificial Sequence
  Cyclic GFR-binding peptide
SPISILYKVGRKPKVLKYHYDDMGVPT

SEQ ID NO: 121425 - protein, 29 aa, Artificial Sequence
  Cyclic GFR-binding peptide
SAISVLYLEIVRKKPIFLKNYQDDMGVPT

SEQ ID NO: 121426 - protein, 27 aa, Artificial Sequence
  Cyclic GFR-binding peptide
SAISILYLVGRTPKVLKNYQDDMGVPT

SEQ ID NO: 121427 - protein, 27 aa, Artificial Sequence
  Cyclic GFR-binding peptide
NAISMLYFDENEKVVLKKYRDDMGVPT

SEQ ID NO: 121428 - protein, 27 aa, Artificial Sequence
  Cyclic GFR-binding peptide
SAISVLYLDDMGVPTLKNYQDDMGVPT

SEQ ID NO: 121429 - protein, 27 aa, Artificial Sequence
  Cyclic GFR-binding peptide
NAISVLYFDDMGVPTLKKYRDDMGVPT

SEQ ID NO: 121430 - protein, 27 aa, Artificial Sequence
  Cyclic GFR-binding peptide
NAISILYFVGRKPKVLKKYRDDMGVPT

SEQ ID NO: 121431 - protein, 27 aa, Artificial Sequence
  Cyclic GFR-binding peptide
SAISMLYLDENEKVVLKNYQDDMGVPT

SEQ ID NO: 121432 - protein, 27 aa, Artificial Sequence
  Cyclic GFR-binding peptide
SPISVLYKDDSSNVILKYHYDDMGVPT

SEQ ID NO: 121433 - protein, 27 aa, Artificial Sequence
  Cyclic GFR-binding peptide
SAISILYLVGRKPKVLKNYQDDMGVPT

SEQ ID NO: 121434 - protein, 27 aa, Artificial Sequence
  Cyclic GFR-binding peptide
NAISVLYFDSSNNVILKKYRDDMGVPT

SEQ ID NO: 121435 - protein, 27 aa, Artificial Sequence
  Cyclic GFR-binding peptide
NAISVLYFDDSSNVILKKYRDDMGVPT

SEQ ID NO: 121436 - protein, 27 aa, Artificial Sequence
  Cyclic GFR-binding peptide
SATSILYYVGRTPKVLRKHRDDMGVPT

SEQ ID NO: 121437 - protein, 29 aa, Artificial Sequence
  Cyclic GFR-binding peptide
SPISVLYKEIVRKKPIFLKYHYDDMGVPT

SEQ ID NO: 121438 - protein, 27 aa, Artificial Sequence
  Cyclic GFR-binding peptide
SATSILYYIGKTPKILRKHRDDMGVPT

SEQ ID NO: 121439 - protein, 27 aa, Artificial Sequence
  Cyclic GFR-binding peptide
SATSVLYYDDMGVPTLRKHRDDMGVPT

SEQ ID NO: 121440 - protein, 27 aa, Artificial Sequence
  Cyclic GFR-binding peptide
SPISVLYKDDMGVPTLKYHYDDMGVPT

SEQ ID NO: 121441 - protein, 27 aa, Artificial Sequence
  Cyclic GFR-binding peptide
SPISVLYKDSSNNVILKYHYDDMGVPT

SEQ ID NO: 121442 - protein, 27 aa, Artificial Sequence
  Cyclic GFR-binding peptide
SATSVLYYDSSNNVILRKHRDDMGVPT

SEQ ID NO: 121443 - protein, 27 aa, Artificial Sequence
  Cyclic GFR-binding peptide
SPISILYKVGRTPKVLKYHYDDMGVPT

SEQ ID NO: 121444 - protein, 27 aa, Artificial Sequence
  Cyclic GFR-binding peptide
SATSVLYYDDSSNVILRKHRDDMGVPT

SEQ ID NO: 121445 - protein, 27 aa, Artificial Sequence
  Cyclic GFR-binding peptide
SATSMLYYDEYDKVVLRKHRDDMGVPT

SEQ ID NO: 121446 - protein, 27 aa, Artificial Sequence
  Cyclic GFR-binding peptide
SAISILYLIGKTPKILKNYQDDMGVPT

SEQ ID NO: 121447 - protein, 27 aa, Artificial Sequence
  Cyclic GFR-binding peptide
SAISMLYLDEYDKVVLKNYQDDMGVPT

SEQ ID NO: 121448 - protein, 27 aa, Artificial Sequence
  Cyclic GFR-binding peptide
SAISVLYLDDSSNVILKNYQDDMGVPT

SEQ ID NO: 121449 - protein, 27 aa, Artificial Sequence
  Cyclic GFR-binding peptide
DDMGVPTRYKKLIKPTKGIFYLISIAN

SEQ ID NO: 121450 - protein, 27 aa, Artificial Sequence
  Cyclic GFR-binding peptide
DDMGVPTNSLQEVVKDYEDYYLMTLPE

SEQ ID NO: 121451 - protein, 27 aa, Artificial Sequence
  Cyclic GFR-binding peptide
DDMGVPTNSLQEIKPTKGIYYVIPLPE

SEQ ID NO: 121452 - protein, 27 aa, Artificial Sequence
  Cyclic GFR-binding peptide
DDMGVPTNSLQEVKPKRGVYYLITLPE

SEQ ID NO: 121453 - protein, 27 aa, Artificial Sequence
  Cyclic GFR-binding peptide
DDMGVPTNSLQEVKPTRGVYYVIPLPE

SEQ ID NO: 121454 - protein, 27 aa, Artificial Sequence
  Cyclic GFR-binding peptide
DDMGVPTRYKKLVVKDYEDFYLMSIAN

SEQ ID NO: 121455 - protein, 27 aa, Artificial Sequence
  Cyclic GFR-binding peptide
DDMGVPTEYQKYIVNSSDDIFLVSIPS

SEQ ID NO: 121456 - protein, 27 aa, Artificial Sequence
  Cyclic GFR-binding peptide
DDMGVPTEYQKYVKPTRGVIFLISIPS

SEQ ID NO: 121457 - protein, 27 aa, Artificial Sequence
  Cyclic GFR-binding peptide
DDMGVPTNSLQEVVKENEDYYLMTLPE

SEQ ID NO: 121458 - protein, 27 aa, Artificial Sequence
  Cyclic GFR-binding peptide
DDMGVPTRYKKLVKPTRGVFYLISIAN

SEQ ID NO: 121459 - protein, 27 aa, Artificial Sequence
  Cyclic GFR-binding peptide
DDMGVPTNSLQEVVNNASDYYLITLPE

SEQ ID NO: 121460 - protein, 27 aa, Artificial Sequence
  Cyclic GFR-binding peptide
DDMGVPTNSLQEVKPKRGVYYVIPLPE

SEQ ID NO: 121461 - protein, 27 aa, Artificial Sequence
  Cyclic GFR-binding peptide
DDMGVPTNSLQEVVNNASDYYVIPLPE

SEQ ID NO: 121462 - protein, 27 aa, Artificial Sequence
  Cyclic GFR-binding peptide
DDMGVPTNSLQEVKPTRGVYYLITLPE

SEQ ID NO: 121463 - protein, 27 aa, Artificial Sequence
  Cyclic GFR-binding peptide
DDMGVPTQYNKLVKPTRGVLYLISIAS

SEQ ID NO: 121464 - protein, 27 aa, Artificial Sequence
  Cyclic GFR-binding peptide
DDMGVPTRYKKLVVKENEDFYLMSIAN

SEQ ID NO: 121465 - protein, 27 aa, Artificial Sequence
  Cyclic GFR-binding peptide
DDMGVPTEYQKYIKPTKGIIFLISIPS

SEQ ID NO: 121466 - protein, 27 aa, Artificial Sequence
  Cyclic GFR-binding peptide
DDMGVPTEYQKYVVNNASDIFLISIPS

SEQ ID NO: 121467 - protein, 27 aa, Artificial Sequence
  Cyclic GFR-binding peptide
DDMGVPTRYKKLVKPKRGVFYLISIAN

SEQ ID NO: 121468 - protein, 27 aa, Artificial Sequence
  Cyclic GFR-binding peptide
DDMGVPTNSLQEIVNSSDDYYVVPLPE

SEQ ID NO: 121469 - protein, 27 aa, Artificial Sequence
  Cyclic GFR-binding peptide
DDMGVPTNSLQEVVKDYEDYYVMPLPE

SEQ ID NO: 121470 - protein, 27 aa, Artificial Sequence
  Cyclic GFR-binding peptide
DDMGVPTQYNKLVVKENEDLYLMSIAS

SEQ ID NO: 121471 - protein, 27 aa, Artificial Sequence
  Cyclic GFR-binding peptide
DDMGVPTEYQKYVVKENEDIFLMSIPS

SEQ ID NO: 121472 - protein, 27 aa, Artificial Sequence
  Cyclic GFR-binding peptide
DDMGVPTQYNKLVKPKRGVLYLISIAS

SEQ ID NO: 121473 - protein, 27 aa, Artificial Sequence
  Cyclic GFR-binding peptide
DDMGVPTRYKKLIVNSSDDFYLVSIAN

SEQ ID NO: 121474 - protein, 27 aa, Artificial Sequence
  Cyclic GFR-binding peptide
DDMGVPTNSLQEVVKENEDYYVMPLPE

SEQ ID NO: 121475 - protein, 27 aa, Artificial Sequence
  Cyclic GFR-binding peptide
DDMGVPTEYQKYVVKDYEDIFLMSIPS

SEQ ID NO: 121476 - protein, 27 aa, Artificial Sequence
  Cyclic GFR-binding peptide
DDMGVPTQYNKLVVNNASDLYLISIAS

SEQ ID NO: 121477 - protein, 27 aa, Artificial Sequence
  Cyclic GFR-binding peptide
DDMGVPTQYNKLIKPTKGILYLISIAS

SEQ ID NO: 121478 - protein, 27 aa, Artificial Sequence
  Cyclic GFR-binding peptide
DDMGVPTNSLQEIKPTKGIYYLITLPE

SEQ ID NO: 121479 - protein, 27 aa, Artificial Sequence
  Cyclic GFR-binding peptide
DDMGVPTEYQKYVKPKRGVIFLISIPS

SEQ ID NO: 121480 - protein, 27 aa, Artificial Sequence
  Cyclic GFR-binding peptide
DDMGVPTQYNKLVVKDYEDLYLMSIAS

SEQ ID NO: 121481 - protein, 27 aa, Artificial Sequence
  Cyclic GFR-binding peptide
DDMGVPTRYKKLVVNNASDFYLISIAN

SEQ ID NO: 121482 - protein, 27 aa, Artificial Sequence
  Cyclic GFR-binding peptide
DDMGVPTNSLQEIVNSSDDYYLVTLPE

SEQ ID NO: 121483 - protein, 27 aa, Artificial Sequence
  Cyclic GFR-binding peptide
DDMGVPTQYNKLIVNSSDDLYLVSIAS

SEQ ID NO: 121484 - protein, 27 aa, Artificial Sequence
  Cyclic GFR-binding peptide
NAISILYFIGKTPKILKKYRDDMGVPT

SEQ ID NO: 121485 - protein, 27 aa, Artificial Sequence
  Cyclic GFR-binding peptide
EPLTMLYYDEYDKVVEQLSNDDMGVPT

SEQ ID NO: 121486 - protein, 27 aa, Artificial Sequence
  Cyclic GFR-binding peptide
EPLPIVYYIGKTPKIEQLSNDDMGVPT

SEQ ID NO: 121487 - protein, 27 aa, Artificial Sequence
  Cyclic GFR-binding peptide
EPLTILYYVGRKPKVEQLSNDDMGVPT

SEQ ID NO: 121488 - protein, 27 aa, Artificial Sequence
  Cyclic GFR-binding peptide
EPLPIVYYVGRTPKVEQLSNDDMGVPT

SEQ ID NO: 121489 - protein, 27 aa, Artificial Sequence
  Cyclic GFR-binding peptide
NAISMLYFDEYDKVVLKKYRDDMGVPT

SEQ ID NO: 121490 - protein, 27 aa, Artificial Sequence
  Cyclic GFR-binding peptide
SPISVLFIDDSSNVIYKQYEDDMGVPT

SEQ ID NO: 121491 - protein, 27 aa, Artificial Sequence
  Cyclic GFR-binding peptide
SPISILFIVGRTPKVYKQYEDDMGVPT

SEQ ID NO: 121492 - protein, 27 aa, Artificial Sequence
  Cyclic GFR-binding peptide
EPLTMLYYDENEKVVEQLSNDDMGVPT

SEQ ID NO: 121493 - protein, 27 aa, Artificial Sequence
  Cyclic GFR-binding peptide
NAISILYFVGRTPKVLKKYRDDMGVPT

SEQ ID NO: 121494 - protein, 27 aa, Artificial Sequence
  Cyclic GFR-binding peptide
EPLTILYYDSANNVVEQLSNDDMGVPT

SEQ ID NO: 121495 - protein, 27 aa, Artificial Sequence
  Cyclic GFR-binding peptide
EPLPIVYYVGRKPKVEQLSNDDMGVPT

SEQ ID NO: 121496 - protein, 27 aa, Artificial Sequence
  Cyclic GFR-binding peptide
EPLPIVYYDSANNVVEQLSNDDMGVPT

SEQ ID NO: 121497 - protein, 27 aa, Artificial Sequence
  Cyclic GFR-binding peptide
EPLTILYYVGRTPKVEQLSNDDMGVPT

SEQ ID NO: 121498 - protein, 27 aa, Artificial Sequence
  Cyclic GFR-binding peptide
SAISILYLVGRTPKVLKNYQDDMGVPT

SEQ ID NO: 121499 - protein, 27 aa, Artificial Sequence
  Cyclic GFR-binding peptide
NAISMLYFDENEKVVLKKYRDDMGVPT

SEQ ID NO: 121500 - protein, 27 aa, Artificial Sequence
  Cyclic GFR-binding peptide
SPISILFIIGKTPKIYKQYEDDMGVPT

SEQ ID NO: 121501 - protein, 27 aa, Artificial Sequence
  Cyclic GFR-binding peptide
SPISILFIDSANNVVYKQYEDDMGVPT

SEQ ID NO: 121502 - protein, 27 aa, Artificial Sequence
  Cyclic GFR-binding peptide
NAISILYFVGRKPKVLKKYRDDMGVPT

SEQ ID NO: 121503 - protein, 27 aa, Artificial Sequence
  Cyclic GFR-binding peptide
EPLPVVYYDDSSNVIEQLSNDDMGVPT

SEQ ID NO: 121504 - protein, 27 aa, Artificial Sequence
  Cyclic GFR-binding peptide
EPLPMVYYDEYDKVVEQLSNDDMGVPT

SEQ ID NO: 121505 - protein, 27 aa, Artificial Sequence
  Cyclic GFR-binding peptide
SAISMLYLDENEKVVLKNYQDDMGVPT

SEQ ID NO: 121506 - protein, 27 aa, Artificial Sequence
  Cyclic GFR-binding peptide
SPISMLFIDENEKVVYKQYEDDMGVPT

SEQ ID NO: 121507 - protein, 27 aa, Artificial Sequence
  Cyclic GFR-binding peptide
SAISILYLVGRKPKVLKNYQDDMGVPT

SEQ ID NO: 121508 - protein, 27 aa, Artificial Sequence
  Cyclic GFR-binding peptide
NAISVLYFDDSSNVILKKYRDDMGVPT

SEQ ID NO: 121509 - protein, 27 aa, Artificial Sequence
  Cyclic GFR-binding peptide
EPLPMVYYDENEKVVEQLSNDDMGVPT

SEQ ID NO: 121510 - protein, 27 aa, Artificial Sequence
  Cyclic GFR-binding peptide
SPISMLFIDEYDKVVYKQYEDDMGVPT

SEQ ID NO: 121511 - protein, 27 aa, Artificial Sequence
  Cyclic GFR-binding peptide
SAISILYLDSANNVVLKNYQDDMGVPT

SEQ ID NO: 121512 - protein, 27 aa, Artificial Sequence
  Cyclic GFR-binding peptide
SAISILYLIGKTPKILKNYQDDMGVPT

SEQ ID NO: 121513 - protein, 27 aa, Artificial Sequence
  Cyclic GFR-binding peptide
EPLTILYYIGKTPKIEQLSNDDMGVPT

SEQ ID NO: 121514 - protein, 27 aa, Artificial Sequence
  Cyclic GFR-binding peptide
SPISILFIVGRKPKVYKQYEDDMGVPT

SEQ ID NO: 121515 - protein, 27 aa, Artificial Sequence
  Cyclic GFR-binding peptide
SAISMLYLDEYDKVVLKNYQDDMGVPT

SEQ ID NO: 121516 - protein, 27 aa, Artificial Sequence
  Cyclic GFR-binding peptide
NAISILYFDSANNVVLKKYRDDMGVPT

SEQ ID NO: 121517 - protein, 27 aa, Artificial Sequence
  Cyclic GFR-binding peptide
EPLTVLYYDDSSNVIEQLSNDDMGVPT

SEQ ID NO: 121518 - protein, 27 aa, Artificial Sequence
  Cyclic GFR-binding peptide
SAISVLYLDDSSNVILKNYQDDMGVPT

SEQ ID NO: 121519 - protein, 29 aa, Artificial Sequence
  Cyclic GFR-binding peptide
DDMGVPTVTAKKLKPKKRVYEIKRVQVPR

SEQ ID NO: 121520 - protein, 29 aa, Artificial Sequence
  Cyclic GFR-binding peptide
DDMGVPTVQVEKLKPKKRVYEVKAVKVSR

SEQ ID NO: 121521 - protein, 29 aa, Artificial Sequence
  Cyclic GFR-binding peptide
DDMGVPTVQVEKFIPKKRVIEVKAVKVSR

SEQ ID NO: 121522 - protein, 29 aa, Artificial Sequence
  Cyclic GFR-binding peptide
DDMGVPTVQVEKHQGQHPKIRVKAMKVSR

SEQ ID NO: 121523 - protein, 29 aa, Artificial Sequence
  Cyclic GFR-binding peptide
DDMGVPTVTAKKHQGQHPKIRIKRMQVPR

SEQ ID NO: 121524 - protein, 29 aa, Artificial Sequence
  Cyclic GFR-binding peptide
DDMGVPTSMEGLLKPKKRVYEMIQVTINS

SEQ ID NO: 121525 - protein, 29 aa, Artificial Sequence
  Cyclic GFR-binding peptide
DDMGVPTSMEGIFIPKKRVIEMIQVTINS

SEQ ID NO: 121526 - protein, 29 aa, Artificial Sequence
  Cyclic GFR-binding peptide
DDMGVPTSMEGLHQGQHPKIRMIQMTINS

SEQ ID NO: 121527 - protein, 29 aa, Artificial Sequence
  Cyclic GFR-binding peptide
DDMGVPTSMEGILKPKKRVYEMIQVTINS

SEQ ID NO: 121528 - protein, 29 aa, Artificial Sequence
  Cyclic GFR-binding peptide
DDMGVPTSMEGLFIPKKRVIEMIQVTINS

SEQ ID NO: 121529 - protein, 29 aa, Artificial Sequence
  Cyclic GFR-binding peptide
DDMGVPTVTAKKFIPKKRVIEIKRVQVPR

SEQ ID NO: 121530 - protein, 29 aa, Artificial Sequence
  Cyclic GFR-binding peptide
DDMGVPTSMEGIHQGQHPKIRMIQMTINS

SEQ ID NO: 121531 - protein, 29 aa, Artificial Sequence
  Cyclic GFR-binding peptide
RPVQVRKIEYVRKKPKLKKATVDDMGVPT

SEQ ID NO: 121532 - protein, 29 aa, Artificial Sequence
  Cyclic GFR-binding peptide
RSVKVAKVEYVRKKPKLKEVQVDDMGVPT

SEQ ID NO: 121533 - protein, 29 aa, Artificial Sequence
  Cyclic GFR-binding peptide
RSVKVAKVEIVRKKPIFKEVQVDDMGVPT

SEQ ID NO: 121534 - protein, 29 aa, Artificial Sequence
  Cyclic GFR-binding peptide
RSVKMAKVRIKPHQGQHKEVQVDDMGVPT

SEQ ID NO: 121535 - protein, 29 aa, Artificial Sequence
  Cyclic GFR-binding peptide
RPVQMRKIRIKPHQGQHKKATVDDMGVPT

SEQ ID NO: 121536 - protein, 29 aa, Artificial Sequence
  Cyclic GFR-binding peptide
SNITVQIMEYVRKKPKLLGEMSDDMGVPT

SEQ ID NO: 121537 - protein, 29 aa, Artificial Sequence
  Cyclic GFR-binding peptide
SNITVQIMEIVRKKPIFIGEMSDDMGVPT

SEQ ID NO: 121538 - protein, 29 aa, Artificial Sequence
  Cyclic GFR-binding peptide
SNITMQIMRIKPHQGQHLGEMSDDMGVPT

SEQ ID NO: 121539 - protein, 29 aa, Artificial Sequence
  Cyclic GFR-binding peptide
SNITVQIMEYVRKKPKLIGEMSDDMGVPT

SEQ ID NO: 121540 - protein, 29 aa, Artificial Sequence
  Cyclic GFR-binding peptide
SNITVQIMEIVRKKPIFLGEMSDDMGVPT

SEQ ID NO: 121541 - protein, 29 aa, Artificial Sequence
  Cyclic GFR-binding peptide
RPVQVRKIEIVRKKPIFKKATVDDMGVPT

SEQ ID NO: 121542 - protein, 29 aa, Artificial Sequence
  Cyclic GFR-binding peptide
SNITMQIMRIKPHQGQHIGEMSDDMGVPT

SEQ ID NO: 121543 - protein, 29 aa, Artificial Sequence
  Cyclic GFR-binding peptide
DDMGVPTVTAKKLKPKKRVYEIKRVQVPR

SEQ ID NO: 121544 - protein, 29 aa, Artificial Sequence
  Cyclic GFR-binding peptide
DDMGVPTVQVEKLKPKKRVYEVKAVKVSR

SEQ ID NO: 121545 - protein, 29 aa, Artificial Sequence
  Cyclic GFR-binding peptide
DDMGVPTVQVEKFIPKKRVIEVKAVKVSR

SEQ ID NO: 121546 - protein, 29 aa, Artificial Sequence
  Cyclic GFR-binding peptide
DDMGVPTVQVEKHQGQHPKIRVKAMKVSR

SEQ ID NO: 121547 - protein, 29 aa, Artificial Sequence
  Cyclic GFR-binding peptide
DDMGVPTVTAKKHQGQHPKIRIKRMQVPR

SEQ ID NO: 121548 - protein, 29 aa, Artificial Sequence
  Cyclic GFR-binding peptide
DDMGVPTSMEGLLKPKKRVYEMIQVTINS

SEQ ID NO: 121549 - protein, 29 aa, Artificial Sequence
  Cyclic GFR-binding peptide
DDMGVPTSMEGIFIPKKRVIEMIQVTINS

SEQ ID NO: 121550 - protein, 29 aa, Artificial Sequence
  Cyclic GFR-binding peptide
DDMGVPTSMEGLHQGQHPKIRMIQMTINS

SEQ ID NO: 121551 - protein, 29 aa, Artificial Sequence
  Cyclic GFR-binding peptide
DDMGVPTSMEGILKPKKRVYEMIQVTINS

SEQ ID NO: 121552 - protein, 29 aa, Artificial Sequence
  Cyclic GFR-binding peptide
DDMGVPTSMEGLFIPKKRVIEMIQVTINS

SEQ ID NO: 121553 - protein, 29 aa, Artificial Sequence
  Cyclic GFR-binding peptide
DDMGVPTVTAKKFIPKKRVIEIKRVQVPR

SEQ ID NO: 121554 - protein, 29 aa, Artificial Sequence
  Cyclic GFR-binding peptide
DDMGVPTSMEGIHQGQHPKIRMIQMTINS

SEQ ID NO: 121555 - protein, 29 aa, Artificial Sequence
  Cyclic GFR-binding peptide
RPVQVRKIEYVRKKPKLKKATVDDMGVPT

SEQ ID NO: 121556 - protein, 29 aa, Artificial Sequence
  Cyclic GFR-binding peptide
RSVKVAKVEYVRKKPKLKEVQVDDMGVPT

SEQ ID NO: 121557 - protein, 29 aa, Artificial Sequence
  Cyclic GFR-binding peptide
RSVKVAKVEIVRKKPIFKEVQVDDMGVPT

SEQ ID NO: 121558 - protein, 29 aa, Artificial Sequence
  Cyclic GFR-binding peptide
RSVKMAKVRIKPHQGQHKEVQVDDMGVPT

SEQ ID NO: 121559 - protein, 29 aa, Artificial Sequence
  Cyclic GFR-binding peptide
RPVQMRKIRIKPHQGQHKKATVDDMGVPT

SEQ ID NO: 121560 - protein, 29 aa, Artificial Sequence
  Cyclic GFR-binding peptide
SNITVQIMEYVRKKPKLLGEMSDDMGVPT

SEQ ID NO: 121561 - protein, 29 aa, Artificial Sequence
  Cyclic GFR-binding peptide
SNITVQIMEIVRKKPIFIGEMSDDMGVPT

SEQ ID NO: 121562 - protein, 29 aa, Artificial Sequence
  Cyclic GFR-binding peptide
SNITMQIMRIKPHQGQHLGEMSDDMGVPT

SEQ ID NO: 121563 - protein, 29 aa, Artificial Sequence
  Cyclic GFR-binding peptide
SNITVQIMEYVRKKPKLIGEMSDDMGVPT

SEQ ID NO: 121564 - protein, 29 aa, Artificial Sequence
  Cyclic GFR-binding peptide
SNITVQIMEIVRKKPIFLGEMSDDMGVPT

SEQ ID NO: 121565 - protein, 29 aa, Artificial Sequence
  Cyclic GFR-binding peptide
RPVQVRKIEIVRKKPIFKKATVDDMGVPT

SEQ ID NO: 121566 - protein, 29 aa, Artificial Sequence
  Cyclic GFR-binding peptide
SNITMQIMRIKPHQGQHIGEMSDDMGVPT

SEQ ID NO: 121567 - protein, 27 aa, Artificial Sequence
  Cyclic GFR-binding peptide
DDMGVPTEYQKYVVKENEDIYLMSIPS

SEQ ID NO: 121568 - protein, 27 aa, Artificial Sequence
  Cyclic GFR-binding peptide
DDMGVPTRYKKLIKPTKGIFYLISIAN

SEQ ID NO: 121569 - protein, 27 aa, Artificial Sequence
  Cyclic GFR-binding peptide
DDMGVPTEYKFKVKPTRGVLYLISIPE

SEQ ID NO: 121570 - protein, 27 aa, Artificial Sequence
  Cyclic GFR-binding peptide
DDMGVPTYHYKLVVKDYEDKYLMSIPS

SEQ ID NO: 121571 - protein, 27 aa, Artificial Sequence
  Cyclic GFR-binding peptide
DDMGVPTEYKFKTPVGMDDLYLVSIPE

SEQ ID NO: 121572 - protein, 27 aa, Artificial Sequence
  Cyclic GFR-binding peptide
DDMGVPTEYQKYVKPKRGVIYLISIPS

SEQ ID NO: 121573 - protein, 27 aa, Artificial Sequence
  Cyclic GFR-binding peptide
DDMGVPTRYKKLVVKDYEDFYLMSIAN

SEQ ID NO: 121574 - protein, 27 aa, Artificial Sequence
  Cyclic GFR-binding peptide
DDMGVPTEYQKYVVKDYEDIYLMSIPS

SEQ ID NO: 121575 - protein, 27 aa, Artificial Sequence
  Cyclic GFR-binding peptide
DDMGVPTRYKKLVKPTRGVFYLISIAN

SEQ ID NO: 121576 - protein, 27 aa, Artificial Sequence
  Cyclic GFR-binding peptide
DDMGVPTYHYKLIKPTKGIKYLISIPS

SEQ ID NO: 121577 - protein, 27 aa, Artificial Sequence
  Cyclic GFR-binding peptide
DDMGVPTYHYKLVVKENEDKYLMSIPS

SEQ ID NO: 121578 - protein, 27 aa, Artificial Sequence
  Cyclic GFR-binding peptide
DDMGVPTYHYKLVKPKRGVKYLISIPS

SEQ ID NO: 121579 - protein, 27 aa, Artificial Sequence
  Cyclic GFR-binding peptide
DDMGVPTEYKFKIKPTKGILYLISIPE

SEQ ID NO: 121580 - protein, 27 aa, Artificial Sequence
  Cyclic GFR-binding peptide
DDMGVPTEYQKYIKPTKGIIYLISIPS

SEQ ID NO: 121581 - protein, 27 aa, Artificial Sequence
  Cyclic GFR-binding peptide
DDMGVPTRYKKLVVKENEDFYLMSIAN

SEQ ID NO: 121582 - protein, 27 aa, Artificial Sequence
  Cyclic GFR-binding peptide
DDMGVPTRYKKLVVNNAADFYLISIAN

SEQ ID NO: 121583 - protein, 27 aa, Artificial Sequence
  Cyclic GFR-binding peptide
DDMGVPTYHYKLYTVVGKDKYLISIPS

SEQ ID NO: 121584 - protein, 27 aa, Artificial Sequence
  Cyclic GFR-binding peptide
DDMGVPTRYKKLTPVGMDDFYLVSIAN

SEQ ID NO: 121585 - protein, 27 aa, Artificial Sequence
  Cyclic GFR-binding peptide
DDMGVPTRYKKLVKPKRGVFYLISIAN

SEQ ID NO: 121586 - protein, 27 aa, Artificial Sequence
  Cyclic GFR-binding peptide
DDMGVPTYHYKLVVNNAADKYLISIPS

SEQ ID NO: 121587 - protein, 27 aa, Artificial Sequence
  Cyclic GFR-binding peptide
DDMGVPTYHYKLIVNSSDDKYLVSIPS

SEQ ID NO: 121588 - protein, 27 aa, Artificial Sequence
  Cyclic GFR-binding peptide
DDMGVPTRYKKLIVNNSSDFYLVSIAN

SEQ ID NO: 121589 - protein, 27 aa, Artificial Sequence
  Cyclic GFR-binding peptide
DDMGVPTRYKKLYTVVGKDFYLISIAN

SEQ ID NO: 121590 - protein, 27 aa, Artificial Sequence
  Cyclic GFR-binding peptide
DDMGVPTEYQKYVVNNAADIYLISIPS

SEQ ID NO: 121591 - protein, 27 aa, Artificial Sequence
  Cyclic GFR-binding peptide
DDMGVPTRYKKLIVNSSDDFYLVSIAN

SEQ ID NO: 121592 - protein, 27 aa, Artificial Sequence
  Cyclic GFR-binding peptide
DDMGVPTEYKFKIVNNSSDLYLVSIPE

SEQ ID NO: 121593 - protein, 27 aa, Artificial Sequence
  Cyclic GFR-binding peptide
DDMGVPTEYQKYVKPTRGVIYLISIPS

SEQ ID NO: 121594 - protein, 27 aa, Artificial Sequence
  Cyclic GFR-binding peptide
DDMGVPTEYQKYIVNSSDDIYLVSIPS

SEQ ID NO: 121595 - protein, 27 aa, Artificial Sequence
  Cyclic GFR-binding peptide
DDMGVPTYHYKLTPVGMDDKYLVSIPS

SEQ ID NO: 121596 - protein, 27 aa, Artificial Sequence
  Cyclic GFR-binding peptide
DDMGVPTYHYKLIVNNSSDKYLVSIPS

SEQ ID NO: 121597 - protein, 27 aa, Artificial Sequence
  Cyclic GFR-binding peptide
DDMGVPTEYKFKIVNSSDDLYLVSIPE

SEQ ID NO: 121598 - protein, 27 aa, Artificial Sequence
  Cyclic GFR-binding peptide
DDMGVPTYHYKLVKPTRGVKYLISIPS

SEQ ID NO: 121599 - protein, 27 aa, Artificial Sequence
  Cyclic GFR-binding peptide
DDMGVPTEYKFKVKPKRGVLYLISIPE

SEQ ID NO: 121600 - protein, 27 aa, Artificial Sequence
  Cyclic GFR-binding peptide
DDMGVPTEYQKYYTVVGKDIYLISIPS

SEQ ID NO: 121601 - protein, 27 aa, Artificial Sequence
  Cyclic GFR-binding peptide
DDMGVPTEYKFKVVKENEDLYLMSIPE

SEQ ID NO: 121602 - protein, 27 aa, Artificial Sequence
  Cyclic GFR-binding peptide
DDMGVPTEYQKYTPVGMDDIYLVSIPS

SEQ ID NO: 121603 - protein, 27 aa, Artificial Sequence
  Cyclic GFR-binding peptide
DDMGVPTEYQKYIVNNSSDIYLVSIPS

SEQ ID NO: 121604 - protein, 27 aa, Artificial Sequence
  Cyclic GFR-binding peptide
DDMGVPTEYKFKVVKDYEDLYLMSIPE

SEQ ID NO: 121605 - protein, 27 aa, Artificial Sequence
  Cyclic GFR-binding peptide
DDMGVPTEYKFKYTVVGKDLYLISIPE

SEQ ID NO: 121606 - protein, 27 aa, Artificial Sequence
  Cyclic GFR-binding peptide
DDMGVPTEYKFKVVNNAADLYLISIPE

SEQ ID NO: 121607 - protein, 27 aa, Artificial Sequence
  Cyclic GFR-binding peptide
SPISMLYIDENEKVVYKQYEDDMGVPT

SEQ ID NO: 121608 - protein, 27 aa, Artificial Sequence
  Cyclic GFR-binding peptide
NAISILYFIGKTPKILKKYRDDMGVPT

SEQ ID NO: 121609 - protein, 27 aa, Artificial Sequence
  Cyclic GFR-binding peptide
EPISILYLVGRTPKVKFKYEDDMGVPT

SEQ ID NO: 121610 - protein, 27 aa, Artificial Sequence
  Cyclic GFR-binding peptide
SPISMLYKDEYDKVVLKYHYDDMGVPT

SEQ ID NO: 121611 - protein, 27 aa, Artificial Sequence
  Cyclic GFR-binding peptide
EPISVLYLDDMGVPTKFKYEDDMGVPT

SEQ ID NO: 121612 - protein, 27 aa, Artificial Sequence
  Cyclic GFR-binding peptide
SPISILYIVGRKPKVYKQYEDDMGVPT

SEQ ID NO: 121613 - protein, 27 aa, Artificial Sequence
  Cyclic GFR-binding peptide
NAISMLYFDEYDKVVLKKYRDDMGVPT

SEQ ID NO: 121614 - protein, 27 aa, Artificial Sequence
  Cyclic GFR-binding peptide
SPISMLYIDEYDKVVYKQYEDDMGVPT

SEQ ID NO: 121615 - protein, 27 aa, Artificial Sequence
  Cyclic GFR-binding peptide
NAISILYFVGRTPKVLKKYRDDMGVPT

SEQ ID NO: 121616 - protein, 27 aa, Artificial Sequence
  Cyclic GFR-binding peptide
SPISILYKIGKTPKILKYHYDDMGVPT

SEQ ID NO: 121617 - protein, 27 aa, Artificial Sequence
  Cyclic GFR-binding peptide
SPISMLYKDENEKVVLKYHYDDMGVPT

SEQ ID NO: 121618 - protein, 27 aa, Artificial Sequence
  Cyclic GFR-binding peptide
SPISILYKVGRKPKVLKYHYDDMGVPT

SEQ ID NO: 121619 - protein, 27 aa, Artificial Sequence
  Cyclic GFR-binding peptide
EPISILYLIGKTPKIKFKYEDDMGVPT

SEQ ID NO: 121620 - protein, 27 aa, Artificial Sequence
  Cyclic GFR-binding peptide
SPISILYIIGKTPKIYKQYEDDMGVPT

SEQ ID NO: 121621 - protein, 27 aa, Artificial Sequence
  Cyclic GFR-binding peptide
NAISMLYFDENEKVVLKKYRDDMGVPT

SEQ ID NO: 121622 - protein, 27 aa, Artificial Sequence
  Cyclic GFR-binding peptide
NAISILYFDAANNVVLKKYRDDMGVPT

SEQ ID NO: 121623 - protein, 27 aa, Artificial Sequence
  Cyclic GFR-binding peptide
SPISILYKDKGVVTYLKYHYDDMGVPT

SEQ ID NO: 121624 - protein, 27 aa, Artificial Sequence
  Cyclic GFR-binding peptide
NAISVLYFDDMGVPTLKKYRDDMGVPT

SEQ ID NO: 121625 - protein, 27 aa, Artificial Sequence
  Cyclic GFR-binding peptide
NAISILYFVGRKPKVLKKYRDDMGVPT

SEQ ID NO: 121626 - protein, 27 aa, Artificial Sequence
  Cyclic GFR-binding peptide
SPISILYKDAANNVVLKYHYDDMGVPT

SEQ ID NO: 121627 - protein, 27 aa, Artificial Sequence
  Cyclic GFR-binding peptide
SPISVLYKDDSSNVILKYHYDDMGVPT

SEQ ID NO: 121628 - protein, 27 aa, Artificial Sequence
  Cyclic GFR-binding peptide
NAISVLYFDSSNNVILKKYRDDMGVPT

SEQ ID NO: 121629 - protein, 27 aa, Artificial Sequence
  Cyclic GFR-binding peptide
NAISILYFDKGVVTYLKKYRDDMGVPT

SEQ ID NO: 121630 - protein, 27 aa, Artificial Sequence
  Cyclic GFR-binding peptide
SPISILYIDAANNVVYKQYEDDMGVPT

SEQ ID NO: 121631 - protein, 27 aa, Artificial Sequence
  Cyclic GFR-binding peptide
NAISVLYFDDSSNVILKKYRDDMGVPT

SEQ ID NO: 121632 - protein, 27 aa, Artificial Sequence
  Cyclic GFR-binding peptide
EPISVLYLDSSNNVIKFKYEDDMGVPT

SEQ ID NO: 121633 - protein, 27 aa, Artificial Sequence
  Cyclic GFR-binding peptide
SPISILYIVGRTPKVYKQYEDDMGVPT

SEQ ID NO: 121634 - protein, 27 aa, Artificial Sequence
  Cyclic GFR-binding peptide
SPISVLYIDDSSNVIYKQYEDDMGVPT

SEQ ID NO: 121635 - protein, 27 aa, Artificial Sequence
  Cyclic GFR-binding peptide
SPISVLYKDDMGVPTLKYHYDDMGVPT

SEQ ID NO: 121636 - protein, 27 aa, Artificial Sequence
  Cyclic GFR-binding peptide
SPISVLYKDSSNNVILKYHYDDMGVPT

SEQ ID NO: 121637 - protein, 27 aa, Artificial Sequence
  Cyclic GFR-binding peptide
EPISVLYLDDSSNVIKFKYEDDMGVPT

SEQ ID NO: 121638 - protein, 27 aa, Artificial Sequence
  Cyclic GFR-binding peptide
SPISILYKVGRTPKVLKYHYDDMGVPT

SEQ ID NO: 121639 - protein, 27 aa, Artificial Sequence
  Cyclic GFR-binding peptide
EPISILYLVGRKPKVKFKYEDDMGVPT

SEQ ID NO: 121640 - protein, 27 aa, Artificial Sequence
  Cyclic GFR-binding peptide
SPISILYIDKGVVTYYKQYEDDMGVPT

SEQ ID NO: 121641 - protein, 27 aa, Artificial Sequence
  Cyclic GFR-binding peptide
EPISMLYLDENEKVVKFKYEDDMGVPT

SEQ ID NO: 121642 - protein, 27 aa, Artificial Sequence
  Cyclic GFR-binding peptide
SPISVLYIDDMGVPTYKQYEDDMGVPT

SEQ ID NO: 121643 - protein, 27 aa, Artificial Sequence
  Cyclic GFR-binding peptide
SPISVLYIDSSNNVIYKQYEDDMGVPT

SEQ ID NO: 121644 - protein, 27 aa, Artificial Sequence
  Cyclic GFR-binding peptide
EPISMLYLDEYDKVVKFKYEDDMGVPT

SEQ ID NO: 121645 - protein, 27 aa, Artificial Sequence
  Cyclic GFR-binding peptide
EPISILYLDKGVVTYKFKYEDDMGVPT

SEQ ID NO: 121646 - protein, 27 aa, Artificial Sequence
  Cyclic GFR-binding peptide
EPISILYLDAANNVVKFKYEDDMGVPT

SEQ ID NO: 121647 - protein, 27 aa, Artificial Sequence
  Cyclic GFR-binding peptide
DDMGVPTPIKGYIIQQKDNFYLMNIPS

SEQ ID NO: 121648 - protein, 27 aa, Artificial Sequence
  Cyclic GFR-binding peptide
DDMGVPTPIKGYVVKDYEDFYLMNIPS

SEQ ID NO: 121649 - protein, 27 aa, Artificial Sequence
  Cyclic GFR-binding peptide
DDMGVPTPIKGYIVNSSDDFYLVNIPS

SEQ ID NO: 121650 - protein, 27 aa, Artificial Sequence
  Cyclic GFR-binding peptide
DDMGVPTPIKGYLLVRGNDFYLMNIPS

SEQ ID NO: 121651 - protein, 27 aa, Artificial Sequence
  Cyclic GFR-binding peptide
DDMGVPTPIKGYVVNNAADFYLINIPS

SEQ ID NO: 121652 - protein, 27 aa, Artificial Sequence
  Cyclic GFR-binding peptide
DDMGVPTPIKGYVVKENEDFYLMNIPS

SEQ ID NO: 121653 - protein, 27 aa, Artificial Sequence
  Cyclic GFR-binding peptide
DDMGVPTPIKGYVVNNASDFYLINIPS

SEQ ID NO: 121654 - protein, 27 aa, Artificial Sequence
  Cyclic GFR-binding peptide
DDMGVPTPIKGYYTVVGKDFYLINIPS

SEQ ID NO: 121655 - protein, 27 aa, Artificial Sequence
  Cyclic GFR-binding peptide
DDMGVPTPIKGYTPVGMDDFYLVNIPS

SEQ ID NO: 121656 - protein, 27 aa, Artificial Sequence
  Cyclic GFR-binding peptide
DDMGVPTPIKGYIVNNSSDFYLVNIPS

SEQ ID NO: 121657 - protein, 27 aa, Artificial Sequence
  Cyclic GFR-binding peptide
SPINMLYFNDKQQIIYGKIPDDMGVPT

SEQ ID NO: 121658 - protein, 27 aa, Artificial Sequence
  Cyclic GFR-binding peptide
SPINMLYFDEYDKVVYGKIPDDMGVPT

SEQ ID NO: 121659 - protein, 27 aa, Artificial Sequence
  Cyclic GFR-binding peptide
SPINVLYFDDSSNVIYGKIPDDMGVPT

SEQ ID NO: 121660 - protein, 27 aa, Artificial Sequence
  Cyclic GFR-binding peptide
SPINMLYFDNGRVLLYGKIPDDMGVPT

SEQ ID NO: 121661 - protein, 27 aa, Artificial Sequence
  Cyclic GFR-binding peptide
SPINILYFDAANNVVYGKIPDDMGVPT

SEQ ID NO: 121662 - protein, 27 aa, Artificial Sequence
  Cyclic GFR-binding peptide
SPINMLYFDENEKVVYGKIPDDMGVPT

SEQ ID NO: 121663 - protein, 27 aa, Artificial Sequence
  Cyclic GFR-binding peptide
SPINILYFDSANNVVYGKIPDDMGVPT

SEQ ID NO: 121664 - protein, 27 aa, Artificial Sequence
  Cyclic GFR-binding peptide
SPINILYFDKGVVTYYGKIPDDMGVPT

SEQ ID NO: 121665 - protein, 27 aa, Artificial Sequence
  Cyclic GFR-binding peptide
SPINVLYFDDMGVPTYGKIPDDMGVPT

SEQ ID NO: 121666 - protein, 27 aa, Artificial Sequence
  Cyclic GFR-binding peptide
SPINVLYFDSSNNVIYGKIPDDMGVPT

SEQ ID NO: 121667 - protein, 27 aa, Artificial Sequence
  Cyclic GFR-binding peptide
DDMGVPTPIKGYIIQQKDNFYLMNIPS

SEQ ID NO: 121668 - protein, 27 aa, Artificial Sequence
  Cyclic GFR-binding peptide
DDMGVPTPIKGYVVKDYEDFYLMNIPS

SEQ ID NO: 121669 - protein, 27 aa, Artificial Sequence
  Cyclic GFR-binding peptide
DDMGVPTPIKGYIVNSSDDFYLVNIPS

SEQ ID NO: 121670 - protein, 27 aa, Artificial Sequence
  Cyclic GFR-binding peptide
DDMGVPTPIKGYLLVRGNDFYLMNIPS

SEQ ID NO: 121671 - protein, 27 aa, Artificial Sequence
  Cyclic GFR-binding peptide
DDMGVPTPIKGYVVNNAADFYLINIPS

SEQ ID NO: 121672 - protein, 27 aa, Artificial Sequence
  Cyclic GFR-binding peptide
DDMGVPTPIKGYVVKENEDFYLMNIPS

SEQ ID NO: 121673 - protein, 27 aa, Artificial Sequence
  Cyclic GFR-binding peptide
DDMGVPTPIKGYVVNNASDFYLINIPS

SEQ ID NO: 121674 - protein, 27 aa, Artificial Sequence
  Cyclic GFR-binding peptide
DDMGVPTPIKGYYTVVGKDFYLINIPS

SEQ ID NO: 121675 - protein, 27 aa, Artificial Sequence
  Cyclic GFR-binding peptide
DDMGVPTPIKGYTPVGMDDFYLVNIPS

SEQ ID NO: 121676 - protein, 27 aa, Artificial Sequence
  Cyclic GFR-binding peptide
DDMGVPTPIKGYIVNNSSDFYLVNIPS

SEQ ID NO: 121677 - protein, 27 aa, Artificial Sequence
  Cyclic GFR-binding peptide
SPINMLYFNDKQQIIYGKIPDDMGVPT

SEQ ID NO: 121678 - protein, 27 aa, Artificial Sequence
  Cyclic GFR-binding peptide
SPINMLYFDEYDKVVYGKIPDDMGVPT

SEQ ID NO: 121679 - protein, 27 aa, Artificial Sequence
  Cyclic GFR-binding peptide
SPINVLYFDDSSNVIYGKIPDDMGVPT

SEQ ID NO: 121680 - protein, 27 aa, Artificial Sequence
  Cyclic GFR-binding peptide
SPINMLYFDNGRVLLYGKIPDDMGVPT

SEQ ID NO: 121681 - protein, 27 aa, Artificial Sequence
  Cyclic GFR-binding peptide
SPINILYFDAANNVVYGKIPDDMGVPT

SEQ ID NO: 121682 - protein, 27 aa, Artificial Sequence
  Cyclic GFR-binding peptide
SPINMLYFDENEKVVYGKIPDDMGVPT

SEQ ID NO: 121683 - protein, 27 aa, Artificial Sequence
  Cyclic GFR-binding peptide
SPINILYFDSANNVVYGKIPDDMGVPT

SEQ ID NO: 121684 - protein, 27 aa, Artificial Sequence
  Cyclic GFR-binding peptide
SPINILYFDKGVVTYYGKIPDDMGVPT

SEQ ID NO: 121685 - protein, 27 aa, Artificial Sequence
  Cyclic GFR-binding peptide
SPINVLYFDDMGVPTYGKIPDDMGVPT

SEQ ID NO: 121686 - protein, 27 aa, Artificial Sequence
  Cyclic GFR-binding peptide
SPINVLYFDSSNNVIYGKIPDDMGVPT

SEQ ID NO: 121687 - protein, 27 aa, Artificial Sequence
  Cyclic GFR-binding peptide
DDMGVPTRYKKLIKPTKGIFYLISIAN

SEQ ID NO: 121688 - protein, 27 aa, Artificial Sequence
  Cyclic GFR-binding peptide
DDMGVPTRYKKLVVKDYEDFYLMSIAN

SEQ ID NO: 121689 - protein, 27 aa, Artificial Sequence
  Cyclic GFR-binding peptide
DDMGVPTRYKKLVKPTRGVFYLISIAN

SEQ ID NO: 121690 - protein, 27 aa, Artificial Sequence
  Cyclic GFR-binding peptide
DDMGVPTRYKKLVVKENEDFYLMSIAN

SEQ ID NO: 121691 - protein, 27 aa, Artificial Sequence
  Cyclic GFR-binding peptide
DDMGVPTRYKKLVKPKRGVFYLISIAN

SEQ ID NO: 121692 - protein, 27 aa, Artificial Sequence
  Cyclic GFR-binding peptide
DDMGVPTRYKKLIVNSSDDFYLVSIAN

SEQ ID NO: 121693 - protein, 27 aa, Artificial Sequence
  Cyclic GFR-binding peptide
DDMGVPTRYKKLVVNNASDFYLISIAN

SEQ ID NO: 121694 - protein, 27 aa, Artificial Sequence
  Cyclic GFR-binding peptide
NAISILYFIGKTPKILKKYRDDMGVPT

SEQ ID NO: 121695 - protein, 27 aa, Artificial Sequence
  Cyclic GFR-binding peptide
NAISMLYFDEYDKVVLKKYRDDMGVPT

SEQ ID NO: 121696 - protein, 27 aa, Artificial Sequence
  Cyclic GFR-binding peptide
NAISILYFVGRTPKVLKKYRDDMGVPT

SEQ ID NO: 121697 - protein, 27 aa, Artificial Sequence
  Cyclic GFR-binding peptide
NAISMLYFDENEKVVLKKYRDDMGVPT

SEQ ID NO: 121698 - protein, 27 aa, Artificial Sequence
  Cyclic GFR-binding peptide
NAISILYFVGRKPKVLKKYRDDMGVPT

SEQ ID NO: 121699 - protein, 27 aa, Artificial Sequence
  Cyclic GFR-binding peptide
NAISVLYFDDSSNVILKKYRDDMGVPT

SEQ ID NO: 121700 - protein, 27 aa, Artificial Sequence
  Cyclic GFR-binding peptide
NAISILYFDSANNVVLKKYRDDMGVPT

SEQ ID NO: 121701 - protein, 27 aa, Artificial Sequence
  Cyclic GFR-binding peptide
DDMGVPTEYQKYVVKENEDIYLMSIPS

SEQ ID NO: 121702 - protein, 27 aa, Artificial Sequence
  Cyclic GFR-binding peptide
DDMGVPTNSLQEVVKDYEDYYLMTLPE

SEQ ID NO: 121703 - protein, 27 aa, Artificial Sequence
  Cyclic GFR-binding peptide
DDMGVPTEYQKYVVKENEDIFLMSIPS

SEQ ID NO: 121704 - protein, 27 aa, Artificial Sequence
  Cyclic GFR-binding peptide
DDMGVPTNSLQEIKPTKGIYYVIPLPE

SEQ ID NO: 121705 - protein, 27 aa, Artificial Sequence
  Cyclic GFR-binding peptide
DDMGVPTNSLQEVKPKRGVYYLITLPE

SEQ ID NO: 121706 - protein, 27 aa, Artificial Sequence
  Cyclic GFR-binding peptide
DDMGVPTEYQKYVVNNAADIYLISIPS

SEQ ID NO: 121707 - protein, 27 aa, Artificial Sequence
  Cyclic GFR-binding peptide
DDMGVPTNSLQEVKPTRGVYYVIPLPE

SEQ ID NO: 121708 - protein, 27 aa, Artificial Sequence
  Cyclic GFR-binding peptide
DDMGVPTEYQKYIVNSSDDIFLVSIPS

SEQ ID NO: 121709 - protein, 27 aa, Artificial Sequence
  Cyclic GFR-binding peptide
DDMGVPTEYQKYVKPTRGVIFLISIPS

SEQ ID NO: 121710 - protein, 27 aa, Artificial Sequence
  Cyclic GFR-binding peptide
DDMGVPTEYQKYVVKDYEDIYLMSIPS

SEQ ID NO: 121711 - protein, 27 aa, Artificial Sequence
  Cyclic GFR-binding peptide
DDMGVPTNSLQEVVKENEDYYLMTLPE

SEQ ID NO: 121712 - protein, 27 aa, Artificial Sequence
  Cyclic GFR-binding peptide
DDMGVPTNSLQEVVNNASDYYLITLPE

SEQ ID NO: 121713 - protein, 27 aa, Artificial Sequence
  Cyclic GFR-binding peptide
DDMGVPTNSLQEVKPKRGVYYVIPLPE

SEQ ID NO: 121714 - protein, 27 aa, Artificial Sequence
  Cyclic GFR-binding peptide
DDMGVPTEYQKYIVNSSDDIYLVSIPS

SEQ ID NO: 121715 - protein, 27 aa, Artificial Sequence
  Cyclic GFR-binding peptide
DDMGVPTNSLQEVVKENEDYYVMPLPE

SEQ ID NO: 121716 - protein, 27 aa, Artificial Sequence
  Cyclic GFR-binding peptide
DDMGVPTEYQKYVVKDYEDIFLMSIPS

SEQ ID NO: 121717 - protein, 27 aa, Artificial Sequence
  Cyclic GFR-binding peptide
DDMGVPTNSLQEVVNNASDYYVIPLPE

SEQ ID NO: 121718 - protein, 27 aa, Artificial Sequence
  Cyclic GFR-binding peptide
DDMGVPTEYQKYVVNNASDIYLISIPS

SEQ ID NO: 121719 - protein, 27 aa, Artificial Sequence
  Cyclic GFR-binding peptide
DDMGVPTNSLQEVKPTRGVYYLITLPE

SEQ ID NO: 121720 - protein, 27 aa, Artificial Sequence
  Cyclic GFR-binding peptide
DDMGVPTEYQKYYTVVGKDIYLISIPS

SEQ ID NO: 121721 - protein, 27 aa, Artificial Sequence
  Cyclic GFR-binding peptide
DDMGVPTEYQKYIIQQKDNIYLMSIPS

SEQ ID NO: 121722 - protein, 27 aa, Artificial Sequence
  Cyclic GFR-binding peptide
DDMGVPTEYQKYTPVGMDDIYLVSIPS

SEQ ID NO: 121723 - protein, 27 aa, Artificial Sequence
  Cyclic GFR-binding peptide
DDMGVPTEYQKYIKPTKGIIFLISIPS

SEQ ID NO: 121724 - protein, 27 aa, Artificial Sequence
  Cyclic GFR-binding peptide
DDMGVPTEYQKYIVNNSSDIYLVSIPS

SEQ ID NO: 121725 - protein, 27 aa, Artificial Sequence
  Cyclic GFR-binding peptide
DDMGVPTNSLQEIKPTKGIYYLITLPE

SEQ ID NO: 121726 - protein, 27 aa, Artificial Sequence
  Cyclic GFR-binding peptide
DDMGVPTEYQKYVVNNASDIFLISIPS

SEQ ID NO: 121727 - protein, 27 aa, Artificial Sequence
  Cyclic GFR-binding peptide
DDMGVPTEYQKYVKPKRGVIFLISIPS

SEQ ID NO: 121728 - protein, 27 aa, Artificial Sequence
  Cyclic GFR-binding peptide
DDMGVPTNSLQEIVNSSDDYYVVPLPE

SEQ ID NO: 121729 - protein, 27 aa, Artificial Sequence
  Cyclic GFR-binding peptide
DDMGVPTNSLQEVVKDYEDYYVMPLPE

SEQ ID NO: 121730 - protein, 27 aa, Artificial Sequence
  Cyclic GFR-binding peptide
DDMGVPTEYQKYLLVRGNDIYLMSIPS

SEQ ID NO: 121731 - protein, 27 aa, Artificial Sequence
  Cyclic GFR-binding peptide
DDMGVPTNSLQEIVNSSDDYYLVTLPE

SEQ ID NO: 121732 - protein, 27 aa, Artificial Sequence
  Cyclic GFR-binding peptide
SPISMLYIDENEKVVYKQYEDDMGVPT

SEQ ID NO: 121733 - protein, 27 aa, Artificial Sequence
  Cyclic GFR-binding peptide
EPLTMLYYDEYDKVVEQLSNDDMGVPT

SEQ ID NO: 121734 - protein, 27 aa, Artificial Sequence
  Cyclic GFR-binding peptide
SPISMLFIDENEKVVYKQYEDDMGVPT

SEQ ID NO: 121735 - protein, 27 aa, Artificial Sequence
  Cyclic GFR-binding peptide
EPLPIVYYIGKTPKIEQLSNDDMGVPT

SEQ ID NO: 121736 - protein, 27 aa, Artificial Sequence
  Cyclic GFR-binding peptide
EPLTILYYVGRKPKVEQLSNDDMGVPT

SEQ ID NO: 121737 - protein, 27 aa, Artificial Sequence
  Cyclic GFR-binding peptide
SPISILYIDAANNVVYKQYEDDMGVPT

SEQ ID NO: 121738 - protein, 27 aa, Artificial Sequence
  Cyclic GFR-binding peptide
EPLPIVYYVGRTPKVEQLSNDDMGVPT

SEQ ID NO: 121739 - protein, 27 aa, Artificial Sequence
  Cyclic GFR-binding peptide
SPISVLFIDDSSNVIYKQYEDDMGVPT

SEQ ID NO: 121740 - protein, 27 aa, Artificial Sequence
  Cyclic GFR-binding peptide
SPISILFIVGRTPKVYKQYEDDMGVPT

SEQ ID NO: 121741 - protein, 27 aa, Artificial Sequence
  Cyclic GFR-binding peptide
SPISMLYIDEYDKVVYKQYEDDMGVPT

SEQ ID NO: 121742 - protein, 27 aa, Artificial Sequence
  Cyclic GFR-binding peptide
EPLTMLYYDENEKVVEQLSNDDMGVPT

SEQ ID NO: 121743 - protein, 27 aa, Artificial Sequence
  Cyclic GFR-binding peptide
EPLTILYYDSANNVVEQLSNDDMGVPT

SEQ ID NO: 121744 - protein, 27 aa, Artificial Sequence
  Cyclic GFR-binding peptide
EPLPIVYYVGRKPKVEQLSNDDMGVPT

SEQ ID NO: 121745 - protein, 27 aa, Artificial Sequence
  Cyclic GFR-binding peptide
SPISVLYIDDSSNVIYKQYEDDMGVPT

SEQ ID NO: 121746 - protein, 27 aa, Artificial Sequence
  Cyclic GFR-binding peptide
EPLPMVYYDENEKVVEQLSNDDMGVPT

SEQ ID NO: 121747 - protein, 27 aa, Artificial Sequence
  Cyclic GFR-binding peptide
SPISMLFIDEYDKVVYKQYEDDMGVPT

SEQ ID NO: 121748 - protein, 27 aa, Artificial Sequence
  Cyclic GFR-binding peptide
EPLPIVYYDSANNVVEQLSNDDMGVPT

SEQ ID NO: 121749 - protein, 27 aa, Artificial Sequence
  Cyclic GFR-binding peptide
SPISILYIDSANNVVYKQYEDDMGVPT

SEQ ID NO: 121750 - protein, 27 aa, Artificial Sequence
  Cyclic GFR-binding peptide
EPLTILYYVGRTPKVEQLSNDDMGVPT

SEQ ID NO: 121751 - protein, 27 aa, Artificial Sequence
  Cyclic GFR-binding peptide
SPISILYIDKGVVTYYKQYEDDMGVPT

SEQ ID NO: 121752 - protein, 27 aa, Artificial Sequence
  Cyclic GFR-binding peptide
SPISMLYINDKQQIIYKQYEDDMGVPT

SEQ ID NO: 121753 - protein, 27 aa, Artificial Sequence
  Cyclic GFR-binding peptide
SPISVLYIDDMGVPTYKQYEDDMGVPT

SEQ ID NO: 121754 - protein, 27 aa, Artificial Sequence
  Cyclic GFR-binding peptide
SPISILFIIGKTPKIYKQYEDDMGVPT

SEQ ID NO: 121755 - protein, 27 aa, Artificial Sequence
  Cyclic GFR-binding peptide
SPISVLYIDSSNNVIYKQYEDDMGVPT

SEQ ID NO: 121756 - protein, 27 aa, Artificial Sequence
  Cyclic GFR-binding peptide
EPLTILYYIGKTPKIEQLSNDDMGVPT

SEQ ID NO: 121757 - protein, 27 aa, Artificial Sequence
  Cyclic GFR-binding peptide
SPISILFIDSANNVVYKQYEDDMGVPT

SEQ ID NO: 121758 - protein, 27 aa, Artificial Sequence
  Cyclic GFR-binding peptide
SPISILFIVGRKPKVYKQYEDDMGVPT

SEQ ID NO: 121759 - protein, 27 aa, Artificial Sequence
  Cyclic GFR-binding peptide
EPLPVVYYDDSSNVIEQLSNDDMGVPT

SEQ ID NO: 121760 - protein, 27 aa, Artificial Sequence
  Cyclic GFR-binding peptide
EPLPMVYYDEYDKVVEQLSNDDMGVPT

SEQ ID NO: 121761 - protein, 27 aa, Artificial Sequence
  Cyclic GFR-binding peptide
SPISMLYIDNGRVLLYKQYEDDMGVPT

SEQ ID NO: 121762 - protein, 27 aa, Artificial Sequence
  Cyclic GFR-binding peptide
EPLTVLYYDDSSNVIEQLSNDDMGVPT

SEQ ID NO: 121763 - protein, 27 aa, Artificial Sequence
  Cyclic GFR-binding peptide
DDMGVPTPYVKLVVKENEDFFLMSLSS

SEQ ID NO: 121764 - protein, 29 aa, Artificial Sequence
  Cyclic GFR-binding peptide
DDMGVPTPYVKLHQGQHPKIRFFLMSLSS

SEQ ID NO: 121765 - protein, 27 aa, Artificial Sequence
  Cyclic GFR-binding peptide
DDMGVPTPYVKLVVNKNEDFFLISLSS

SEQ ID NO: 121766 - protein, 27 aa, Artificial Sequence
  Cyclic GFR-binding peptide
DDMGVPTPYVKLVKPKRGVLFFISLSS

SEQ ID NO: 121767 - protein, 27 aa, Artificial Sequence
  Cyclic GFR-binding peptide
DDMGVPTPYVKLVVNNAADFFLISLSS

SEQ ID NO: 121768 - protein, 27 aa, Artificial Sequence
  Cyclic GFR-binding peptide
DDMGVPTPYVKLIVNNSSDFFLVSLSS

SEQ ID NO: 121769 - protein, 27 aa, Artificial Sequence
  Cyclic GFR-binding peptide
DDMGVPTPYVKLIIQQKDNFFLMSLSS

SEQ ID NO: 121770 - protein, 27 aa, Artificial Sequence
  Cyclic GFR-binding peptide
DDMGVPTPYVKLLLVRGNDFFLMSLSS

SEQ ID NO: 121771 - protein, 27 aa, Artificial Sequence
  Cyclic GFR-binding peptide
DDMGVPTPYVKLVKPTRGVLFFISLSS

SEQ ID NO: 121772 - protein, 27 aa, Artificial Sequence
  Cyclic GFR-binding peptide
DDMGVPTPYVKLVVNNASDFFLISLSS

SEQ ID NO: 121773 - protein, 27 aa, Artificial Sequence
  Cyclic GFR-binding peptide
DDMGVPTPYVKLIKPTKGILFFISLSS

SEQ ID NO: 121774 - protein, 27 aa, Artificial Sequence
  Cyclic GFR-binding peptide
DDMGVPTPYVKLTPVGMDDFFLVSLSS

SEQ ID NO: 121775 - protein, 27 aa, Artificial Sequence
  Cyclic GFR-binding peptide
DDMGVPTPYVKLYTVVGKDFFLISLSS

SEQ ID NO: 121776 - protein, 27 aa, Artificial Sequence
  Cyclic GFR-binding peptide
DDMGVPTPYVKLVVKDYEDFFLMSLSS

SEQ ID NO: 121777 - protein, 27 aa, Artificial Sequence
  Cyclic GFR-binding peptide
DDMGVPTPYVKLIVNSSDDFFLVSLSS

SEQ ID NO: 121778 - protein, 29 aa, Artificial Sequence
  Cyclic GFR-binding peptide
DDMGVPTPYVKLLKPKKRVYEFFLVSLSS

SEQ ID NO: 121779 - protein, 27 aa, Artificial Sequence
  Cyclic GFR-binding peptide
SSLSMLFFDENEKVVLKVYPDDMGVPT

SEQ ID NO: 121780 - protein, 29 aa, Artificial Sequence
  Cyclic GFR-binding peptide
SSLSMLFFRIKPHQGQHLKVYPDDMGVPT

SEQ ID NO: 121781 - protein, 27 aa, Artificial Sequence
  Cyclic GFR-binding peptide
SSLSILFFDENKNVVLKVYPDDMGVPT

SEQ ID NO: 121782 - protein, 27 aa, Artificial Sequence
  Cyclic GFR-binding peptide
SSLSILFFVGRKPKVLKVYPDDMGVPT

SEQ ID NO: 121783 - protein, 27 aa, Artificial Sequence
  Cyclic GFR-binding peptide
SSLSILFFDAANNVVLKVYPDDMGVPT

SEQ ID NO: 121784 - protein, 27 aa, Artificial Sequence
  Cyclic GFR-binding peptide
SSLSVLFFDSSNNVILKVYPDDMGVPT

SEQ ID NO: 121785 - protein, 27 aa, Artificial Sequence
  Cyclic GFR-binding peptide
SSLSMLFFNDKQQIILKVYPDDMGVPT

SEQ ID NO: 121786 - protein, 27 aa, Artificial Sequence
  Cyclic GFR-binding peptide
SSLSMLFFDNGRVLLLKVYPDDMGVPT

SEQ ID NO: 121787 - protein, 27 aa, Artificial Sequence
  Cyclic GFR-binding peptide
SSLSILFFVGRTPKVLKVYPDDMGVPT

SEQ ID NO: 121788 - protein, 27 aa, Artificial Sequence
  Cyclic GFR-binding peptide
SSLSILFFDSANNVVLKVYPDDMGVPT

SEQ ID NO: 121789 - protein, 27 aa, Artificial Sequence
  Cyclic GFR-binding peptide
SSLSILFFIGKTPKILKVYPDDMGVPT

SEQ ID NO: 121790 - protein, 27 aa, Artificial Sequence
  Cyclic GFR-binding peptide
SSLSVLFFDDMGVPTLKVYPDDMGVPT

SEQ ID NO: 121791 - protein, 27 aa, Artificial Sequence
  Cyclic GFR-binding peptide
SSLSILFFDKGVVTYLKVYPDDMGVPT

SEQ ID NO: 121792 - protein, 27 aa, Artificial Sequence
  Cyclic GFR-binding peptide
SSLSMLFFDEYDKVVLKVYPDDMGVPT

SEQ ID NO: 121793 - protein, 27 aa, Artificial Sequence
  Cyclic GFR-binding peptide
SSLSVLFFDDSSNVILKVYPDDMGVPT

SEQ ID NO: 121794 - protein, 29 aa, Artificial Sequence
  Cyclic GFR-binding peptide
SSLSVLFFEYVRKKPKLLKVYPDDMGVPT

SEQ ID NO: 121795 - protein, 27 aa, Artificial Sequence
  Cyclic GFR-binding peptide
DDMGVPTNSLQEVVKDYEDYYLMTLPE

SEQ ID NO: 121796 - protein, 27 aa, Artificial Sequence
  Cyclic GFR-binding peptide
DDMGVPTNSLQEIKPTKGIYYVIPLPE

SEQ ID NO: 121797 - protein, 27 aa, Artificial Sequence
  Cyclic GFR-binding peptide
DDMGVPTSMEGIIVNSSDDMIQVTINS

SEQ ID NO: 121798 - protein, 27 aa, Artificial Sequence
  Cyclic GFR-binding peptide
DDMGVPTNSLQEVKPKRGVYYLITLPE

SEQ ID NO: 121799 - protein, 27 aa, Artificial Sequence
  Cyclic GFR-binding peptide
DDMGVPTNSLQEVKPTRGVYYVIPLPE

SEQ ID NO: 121800 - protein, 27 aa, Artificial Sequence
  Cyclic GFR-binding peptide
DDMGVPTVTAKKVVKENEDIKRMQVPR

SEQ ID NO: 121801 - protein, 27 aa, Artificial Sequence
  Cyclic GFR-binding peptide
DDMGVPTNSLQEIVNSSDDYYVVPLPE

SEQ ID NO: 121802 - protein, 29 aa, Artificial Sequence
  Cyclic GFR-binding peptide
DDMGVPTSMEGIHQGQHPKIRMIQMTINS

SEQ ID NO: 121803 - protein, 29 aa, Artificial Sequence
  Cyclic GFR-binding peptide
DDMGVPTVTAKKLKPKKRVYEIKRVQVPR

SEQ ID NO: 121804 - protein, 27 aa, Artificial Sequence
  Cyclic GFR-binding peptide
DDMGVPTSMEGIVVKDYEDMIQMTINS

SEQ ID NO: 121805 - protein, 29 aa, Artificial Sequence
  Cyclic GFR-binding peptide
DDMGVPTVQVEKHQGQHPKIRVKAMKVSR

SEQ ID NO: 121806 - protein, 27 aa, Artificial Sequence
  Cyclic GFR-binding peptide
DDMGVPTVTAKKIKPTKGIIKRIQVPR

SEQ ID NO: 121807 - protein, 27 aa, Artificial Sequence
  Cyclic GFR-binding peptide
DDMGVPTSMEGIVKPTRGVMIQITINS

SEQ ID NO: 121808 - protein, 29 aa, Artificial Sequence
  Cyclic GFR-binding peptide
DDMGVPTNSLQEFIPKKRVIEYYVVPLPE

SEQ ID NO: 121809 - protein, 27 aa, Artificial Sequence
  Cyclic GFR-binding peptide
DDMGVPTVQVEKVKPKRGVVKAIKVSR

SEQ ID NO: 121810 - protein, 27 aa, Artificial Sequence
  Cyclic GFR-binding peptide
DDMGVPTVQVEKVVKENEDVKAMKVSR

SEQ ID NO: 121811 - protein, 27 aa, Artificial Sequence
  Cyclic GFR-binding peptide
DDMGVPTNSLQEVVKENEDYYVMPLPE

SEQ ID NO: 121812 - protein, 27 aa, Artificial Sequence
  Cyclic GFR-binding peptide
DDMGVPTVTAKKIVNSSDDIKRVQVPR

SEQ ID NO: 121813 - protein, 27 aa, Artificial Sequence
  Cyclic GFR-binding peptide
DDMGVPTVQVEKIKPTKGIVKAIKVSR

SEQ ID NO: 121814 - protein, 27 aa, Artificial Sequence
  Cyclic GFR-binding peptide
DDMGVPTNSLQEIKPTKGIYYLITLPE

SEQ ID NO: 121815 - protein, 29 aa, Artificial Sequence
  Cyclic GFR-binding peptide
DDMGVPTNSLQEFIPKKRVIEYYLVTLPE

SEQ ID NO: 121816 - protein, 27 aa, Artificial Sequence
  Cyclic GFR-binding peptide
DDMGVPTVQVEKIVNSSDDVKAVKVSR

SEQ ID NO: 121817 - protein, 27 aa, Artificial Sequence
  Cyclic GFR-binding peptide
DDMGVPTNSLQEIVNSSDDYYLVTLPE

SEQ ID NO: 121818 - protein, 29 aa, Artificial Sequence
  Cyclic GFR-binding peptide
DDMGVPTVQVEKLKPKKRVYEVKAVKVSR

SEQ ID NO: 121819 - protein, 29 aa, Artificial Sequence
  Cyclic GFR-binding peptide
DDMGVPTVQVEKFIPKKRVIEVKAVKVSR

SEQ ID NO: 121820 - protein, 29 aa, Artificial Sequence
  Cyclic GFR-binding peptide
DDMGVPTVTAKKHQGQHPKIRIKRMQVPR

SEQ ID NO: 121821 - protein, 27 aa, Artificial Sequence
  Cyclic GFR-binding peptide
DDMGVPTNSLQEVVKENEDYYLMTLPE

SEQ ID NO: 121822 - protein, 29 aa, Artificial Sequence
  Cyclic GFR-binding peptide
DDMGVPTSMEGIFIPKKRVIEMIQVTINS

SEQ ID NO: 121823 - protein, 27 aa, Artificial Sequence
  Cyclic GFR-binding peptide
DDMGVPTNSLQEVKPKRGVYYVIPLPE

SEQ ID NO: 121824 - protein, 27 aa, Artificial Sequence
  Cyclic GFR-binding peptide
DDMGVPTVTAKKVKPKRGVIKRIQVPR

SEQ ID NO: 121825 - protein, 27 aa, Artificial Sequence
  Cyclic GFR-binding peptide
DDMGVPTNSLQEVKPTRGVYYLITLPE

SEQ ID NO: 121826 - protein, 27 aa, Artificial Sequence
  Cyclic GFR-binding peptide
DDMGVPTVQVEKVKPTRGVVKAIKVSR

SEQ ID NO: 121827 - protein, 29 aa, Artificial Sequence
  Cyclic GFR-binding peptide
DDMGVPTSMEGILKPKKRVYEMIQVTINS

SEQ ID NO: 121828 - protein, 27 aa, Artificial Sequence
  Cyclic GFR-binding peptide
DDMGVPTNSLQEVVKDYEDYYVMPLPE

SEQ ID NO: 121829 - protein, 27 aa, Artificial Sequence
  Cyclic GFR-binding peptide
DDMGVPTVTAKKVKPTRGVIKRIQVPR

SEQ ID NO: 121830 - protein, 29 aa, Artificial Sequence
  Cyclic GFR-binding peptide
DDMGVPTNSLQELKPKKRVYEYYLVTLPE

SEQ ID NO: 121831 - protein, 27 aa, Artificial Sequence
  Cyclic GFR-binding peptide
DDMGVPTSMEGIVKPKRGVMIQITINS

SEQ ID NO: 121832 - protein, 27 aa, Artificial Sequence
  Cyclic GFR-binding peptide
DDMGVPTSMEGIVVKENEDMIQMTINS

SEQ ID NO: 121833 - protein, 27 aa, Artificial Sequence
  Cyclic GFR-binding peptide
DDMGVPTSMEGIIKPTKGIMIQITINS

SEQ ID NO: 121834 - protein, 29 aa, Artificial Sequence
  Cyclic GFR-binding peptide
DDMGVPTNSLQEHQGQHPKIRYYLMTLPE

SEQ ID NO: 121835 - protein, 27 aa, Artificial Sequence
  Cyclic GFR-binding peptide
DDMGVPTVTAKKVVKDYEDIKRMQVPR

SEQ ID NO: 121836 - protein, 29 aa, Artificial Sequence
  Cyclic GFR-binding peptide
DDMGVPTNSLQEHQGQHPKIRYYVMPLPE

SEQ ID NO: 121837 - protein, 29 aa, Artificial Sequence
  Cyclic GFR-binding peptide
DDMGVPTNSLQELKPKKRVYEYYVVPLPE

SEQ ID NO: 121838 - protein, 29 aa, Artificial Sequence
  Cyclic GFR-binding peptide
DDMGVPTVTAKKFIPKKRVIEIKRVQVPR

SEQ ID NO: 121839 - protein, 27 aa, Artificial Sequence
  Cyclic GFR-binding peptide
DDMGVPTVQVEKVVKDYEDVKAMKVSR

SEQ ID NO: 121840 - protein, 27 aa, Artificial Sequence
  Cyclic GFR-binding peptide
EPLTMLYYDEYDKVVEQLSNDDMGVPT

SEQ ID NO: 121841 - protein, 27 aa, Artificial Sequence
  Cyclic GFR-binding peptide
EPLPIVYYIGKTPKIEQLSNDDMGVPT

SEQ ID NO: 121842 - protein, 27 aa, Artificial Sequence
  Cyclic GFR-binding peptide
SNITVQIMDDSSNVIIGEMSDDMGVPT

SEQ ID NO: 121843 - protein, 27 aa, Artificial Sequence
  Cyclic GFR-binding peptide
EPLTILYYVGRKPKVEQLSNDDMGVPT

SEQ ID NO: 121844 - protein, 27 aa, Artificial Sequence
  Cyclic GFR-binding peptide
EPLPIVYYVGRTPKVEQLSNDDMGVPT

SEQ ID NO: 121845 - protein, 27 aa, Artificial Sequence
  Cyclic GFR-binding peptide
RPVQMRKIDENEKVVKKATVDDMGVPT

SEQ ID NO: 121846 - protein, 27 aa, Artificial Sequence
  Cyclic GFR-binding peptide
EPLPVVYYDDSSNVIEQLSNDDMGVPT

SEQ ID NO: 121847 - protein, 29 aa, Artificial Sequence
  Cyclic GFR-binding peptide
SNITMQIMRIKPHQGQHIGEMSDDMGVPT

SEQ ID NO: 121848 - protein, 29 aa, Artificial Sequence
  Cyclic GFR-binding peptide
RPVQVRKIEYVRKKPKLKKATVDDMGVPT

SEQ ID NO: 121849 - protein, 27 aa, Artificial Sequence
  Cyclic GFR-binding peptide
SNITMQIMDEYDKVVIGEMSDDMGVPT

SEQ ID NO: 121850 - protein, 29 aa, Artificial Sequence
  Cyclic GFR-binding peptide
RSVKMAKVRIKPHQGQHKEVQVDDMGVPT

SEQ ID NO: 121851 - protein, 27 aa, Artificial Sequence
  Cyclic GFR-binding peptide
RPVQIRKIIGKTPKIKKATVDDMGVPT

SEQ ID NO: 121852 - protein, 27 aa, Artificial Sequence
  Cyclic GFR-binding peptide
SNITIQIMVGRTPKVIGEMSDDMGVPT

SEQ ID NO: 121853 - protein, 29 aa, Artificial Sequence
  Cyclic GFR-binding peptide
EPLPVVYYEIVRKKPIFEQLSNDDMGVPT

SEQ ID NO: 121854 - protein, 27 aa, Artificial Sequence
  Cyclic GFR-binding peptide
RSVKIAKVVGRKPKVKEVQVDDMGVPT

SEQ ID NO: 121855 - protein, 27 aa, Artificial Sequence
  Cyclic GFR-binding peptide
RSVKMAKVDENEKVVKEVQVDDMGVPT

SEQ ID NO: 121856 - protein, 27 aa, Artificial Sequence
  Cyclic GFR-binding peptide
EPLPMVYYDENEKVVEQLSNDDMGVPT

SEQ ID NO: 121857 - protein, 27 aa, Artificial Sequence
  Cyclic GFR-binding peptide
RPVQVRKIDDSSNVIKKATVDDMGVPT

SEQ ID NO: 121858 - protein, 27 aa, Artificial Sequence
  Cyclic GFR-binding peptide
RSVKIAKVIGKTPKIKEVQVDDMGVPT

SEQ ID NO: 121859 - protein, 27 aa, Artificial Sequence
  Cyclic GFR-binding peptide
EPLTILYYIGKTPKIEQLSNDDMGVPT

SEQ ID NO: 121860 - protein, 29 aa, Artificial Sequence
  Cyclic GFR-binding peptide
EPLTVLYYEIVRKKPIFEQLSNDDMGVPT

SEQ ID NO: 121861 - protein, 27 aa, Artificial Sequence
  Cyclic GFR-binding peptide
RSVKVAKVDDSSNVIKEVQVDDMGVPT

SEQ ID NO: 121862 - protein, 27 aa, Artificial Sequence
  Cyclic GFR-binding peptide
EPLTVLYYDDSSNVIEQLSNDDMGVPT

SEQ ID NO: 121863 - protein, 29 aa, Artificial Sequence
  Cyclic GFR-binding peptide
RSVKVAKVEYVRKKPKLKEVQVDDMGVPT

SEQ ID NO: 121864 - protein, 29 aa, Artificial Sequence
  Cyclic GFR-binding peptide
RSVKVAKVEIVRKKPIFKEVQVDDMGVPT

SEQ ID NO: 121865 - protein, 29 aa, Artificial Sequence
  Cyclic GFR-binding peptide
RPVQMRKIRIKPHQGQHKKATVDDMGVPT

SEQ ID NO: 121866 - protein, 27 aa, Artificial Sequence
  Cyclic GFR-binding peptide
EPLTMLYYDENEKVVEQLSNDDMGVPT

SEQ ID NO: 121867 - protein, 29 aa, Artificial Sequence
  Cyclic GFR-binding peptide
SNITVQIMEIVRKKPIFIGEMSDDMGVPT

SEQ ID NO: 121868 - protein, 27 aa, Artificial Sequence
  Cyclic GFR-binding peptide
EPLPIVYYVGRKPKVEQLSNDDMGVPT

SEQ ID NO: 121869 - protein, 27 aa, Artificial Sequence
  Cyclic GFR-binding peptide
RPVQIRKIVGRKPKVKKATVDDMGVPT

SEQ ID NO: 121870 - protein, 27 aa, Artificial Sequence
  Cyclic GFR-binding peptide
EPLTILYYVGRTPKVEQLSNDDMGVPT

SEQ ID NO: 121871 - protein, 27 aa, Artificial Sequence
  Cyclic GFR-binding peptide
RSVKIAKVVGRTPKVKEVQVDDMGVPT

SEQ ID NO: 121872 - protein, 29 aa, Artificial Sequence
  Cyclic GFR-binding peptide
SNITVQIMEYVRKKPKLIGEMSDDMGVPT

SEQ ID NO: 121873 - protein, 27 aa, Artificial Sequence
  Cyclic GFR-binding peptide
EPLPMVYYDEYDKVVEQLSNDDMGVPT

SEQ ID NO: 121874 - protein, 27 aa, Artificial Sequence
  Cyclic GFR-binding peptide
RPVQIRKIVGRTPKVKKATVDDMGVPT

SEQ ID NO: 121875 - protein, 29 aa, Artificial Sequence
  Cyclic GFR-binding peptide
EPLTVLYYEYVRKKPKLEQLSNDDMGVPT

SEQ ID NO: 121876 - protein, 27 aa, Artificial Sequence
  Cyclic GFR-binding peptide
SNITIQIMVGRKPKVIGEMSDDMGVPT

SEQ ID NO: 121877 - protein, 27 aa, Artificial Sequence
  Cyclic GFR-binding peptide
SNITMQIMDENEKVVIGEMSDDMGVPT

SEQ ID NO: 121878 - protein, 27 aa, Artificial Sequence
  Cyclic GFR-binding peptide
SNITIQIMIGKTPKIIGEMSDDMGVPT

SEQ ID NO: 121879 - protein, 29 aa, Artificial Sequence
  Cyclic GFR-binding peptide
EPLTMLYYRIKPHQGQHEQLSNDDMGVPT

SEQ ID NO: 121880 - protein, 27 aa, Artificial Sequence
  Cyclic GFR-binding peptide
RPVQMRKIDEYDKVVKKATVDDMGVPT

SEQ ID NO: 121881 - protein, 29 aa, Artificial Sequence
  Cyclic GFR-binding peptide
EPLPMVYYRIKPHQGQHEQLSNDDMGVPT

SEQ ID NO: 121882 - protein, 29 aa, Artificial Sequence
  Cyclic GFR-binding peptide
EPLPVVYYEYVRKKPKLEQLSNDDMGVPT

SEQ ID NO: 121883 - protein, 29 aa, Artificial Sequence
  Cyclic GFR-binding peptide
RPVQVRKIEIVRKKPIFKKATVDDMGVPT

SEQ ID NO: 121884 - protein, 27 aa, Artificial Sequence
  Cyclic GFR-binding peptide
RSVKMAKVDEYDKVVKEVQVDDMGVPT

SEQ ID NO: 121885 - protein, 27 aa, Artificial Sequence
  Cyclic GFR-binding peptide
DDMGVPTRYKKLIIQQKDNFYLMSIAN

SEQ ID NO: 121886 - protein, 27 aa, Artificial Sequence
  Cyclic GFR-binding peptide
DDMGVPTRYKKLIVNNSSDFYLVSIAN

SEQ ID NO: 121887 - protein, 27 aa, Artificial Sequence
  Cyclic GFR-binding peptide
DDMGVPTRYKKLYTVVGKDFYLISIAN

SEQ ID NO: 121888 - protein, 27 aa, Artificial Sequence
  Cyclic GFR-binding peptide
DDMGVPTRYKKLIVNSSDDFYLVSIAN

SEQ ID NO: 121889 - protein, 27 aa, Artificial Sequence
  Cyclic GFR-binding peptide
DDMGVPTRYKKLVVKDYEDFYLMSIAN

SEQ ID NO: 121890 - protein, 27 aa, Artificial Sequence
  Cyclic GFR-binding peptide
DDMGVPTRYKKLLLVRGNDFYLMSIAN

SEQ ID NO: 121891 - protein, 27 aa, Artificial Sequence
  Cyclic GFR-binding peptide
DDMGVPTRYKKLVVKENEDFYLMSIAN

SEQ ID NO: 121892 - protein, 27 aa, Artificial Sequence
  Cyclic GFR-binding peptide
DDMGVPTRYKKLVVNNAADFYLISIAN

SEQ ID NO: 121893 - protein, 27 aa, Artificial Sequence
  Cyclic GFR-binding peptide
DDMGVPTRYKKLTPVGMDDFYLVSIAN

SEQ ID NO: 121894 - protein, 27 aa, Artificial Sequence
  Cyclic GFR-binding peptide
DDMGVPTRYKKLVVNNASDFYLISIAN

SEQ ID NO: 121895 - protein, 27 aa, Artificial Sequence
  Cyclic GFR-binding peptide
NAISMLYFNDKQQIILKKYRDDMGVPT

SEQ ID NO: 121896 - protein, 27 aa, Artificial Sequence
  Cyclic GFR-binding peptide
NAISVLYFDSSNNVILKKYRDDMGVPT

SEQ ID NO: 121897 - protein, 27 aa, Artificial Sequence
  Cyclic GFR-binding peptide
NAISILYFDKGVVTYLKKYRDDMGVPT

SEQ ID NO: 121898 - protein, 27 aa, Artificial Sequence
  Cyclic GFR-binding peptide
NAISVLYFDDSSNVILKKYRDDMGVPT

SEQ ID NO: 121899 - protein, 27 aa, Artificial Sequence
  Cyclic GFR-binding peptide
NAISMLYFDEYDKVVLKKYRDDMGVPT

SEQ ID NO: 121900 - protein, 27 aa, Artificial Sequence
  Cyclic GFR-binding peptide
NAISMLYFDNGRVLLLKKYRDDMGVPT

SEQ ID NO: 121901 - protein, 27 aa, Artificial Sequence
  Cyclic GFR-binding peptide
NAISMLYFDENEKVVLKKYRDDMGVPT

SEQ ID NO: 121902 - protein, 27 aa, Artificial Sequence
  Cyclic GFR-binding peptide
NAISILYFDAANNVVLKKYRDDMGVPT

SEQ ID NO: 121903 - protein, 27 aa, Artificial Sequence
  Cyclic GFR-binding peptide
NAISVLYFDDMGVPTLKKYRDDMGVPT

SEQ ID NO: 121904 - protein, 27 aa, Artificial Sequence
  Cyclic GFR-binding peptide
NAISILYFDSANNVVLKKYRDDMGVPT

SEQ ID NO: 121905 - protein, 27 aa, Artificial Sequence
  Cyclic GFR-binding peptide
DDMGVPTEYKFKVKPTRGVLYLISIPE

SEQ ID NO: 121906 - protein, 27 aa, Artificial Sequence
  Cyclic GFR-binding peptide
DDMGVPTYHYKLVVKDYEDKYLMSIPS

SEQ ID NO: 121907 - protein, 27 aa, Artificial Sequence
  Cyclic GFR-binding peptide
DDMGVPTEYKFKTPVGMDDLYLVSIPE

SEQ ID NO: 121908 - protein, 27 aa, Artificial Sequence
  Cyclic GFR-binding peptide
DDMGVPTRYKKLVVKDYEDFYLMSIAN

SEQ ID NO: 121909 - protein, 27 aa, Artificial Sequence
  Cyclic GFR-binding peptide
DDMGVPTRHKRLVKPKRGVYYLISTAS

SEQ ID NO: 121910 - protein, 27 aa, Artificial Sequence
  Cyclic GFR-binding peptide
DDMGVPTYHYKLVKPKRGVKYLISIPS

SEQ ID NO: 121911 - protein, 27 aa, Artificial Sequence
  Cyclic GFR-binding peptide
DDMGVPTEYKFKIKPTKGILYLISIPE

SEQ ID NO: 121912 - protein, 27 aa, Artificial Sequence
  Cyclic GFR-binding peptide
DDMGVPTEYKFKVVNKNEDLYLISIPE

SEQ ID NO: 121913 - protein, 27 aa, Artificial Sequence
  Cyclic GFR-binding peptide
DDMGVPTPIKGYVKPTRGVFYLINIPS

SEQ ID NO: 121914 - protein, 27 aa, Artificial Sequence
  Cyclic GFR-binding peptide
DDMGVPTPIKGYVVKENEDFYLMNIPS

SEQ ID NO: 121915 - protein, 27 aa, Artificial Sequence
  Cyclic GFR-binding peptide
DDMGVPTYHYKLYTVVGKDKYLISIPS

SEQ ID NO: 121916 - protein, 27 aa, Artificial Sequence
  Cyclic GFR-binding peptide
DDMGVPTEYKFKLLVRGNDLYLMSIPE

SEQ ID NO: 121917 - protein, 27 aa, Artificial Sequence
  Cyclic GFR-binding peptide
DDMGVPTRYKKLVKPKRGVFYLISIAN

SEQ ID NO: 121918 - protein, 27 aa, Artificial Sequence
  Cyclic GFR-binding peptide
DDMGVPTPIKGYTPVGMDDFYLVNIPS

SEQ ID NO: 121919 - protein, 27 aa, Artificial Sequence
  Cyclic GFR-binding peptide
DDMGVPTYHYKLVVNKNEDKYLISIPS

SEQ ID NO: 121920 - protein, 27 aa, Artificial Sequence
  Cyclic GFR-binding peptide
DDMGVPTYHYKLIVNSSDDKYLVSIPS

SEQ ID NO: 121921 - protein, 27 aa, Artificial Sequence
  Cyclic GFR-binding peptide
DDMGVPTPIKGYIVNSSDDFYLVNIPS

SEQ ID NO: 121922 - protein, 27 aa, Artificial Sequence
  Cyclic GFR-binding peptide
DDMGVPTRYKKLYTVVGKDFYLISIAN

SEQ ID NO: 121923 - protein, 27 aa, Artificial Sequence
  Cyclic GFR-binding peptide
DDMGVPTRHKRLLLVRGNDYYLMSTAS

SEQ ID NO: 121924 - protein, 27 aa, Artificial Sequence
  Cyclic GFR-binding peptide
DDMGVPTYHYKLLLVRGNDKYLMSIPS

SEQ ID NO: 121925 - protein, 27 aa, Artificial Sequence
  Cyclic GFR-binding peptide
DDMGVPTRYKKLIVNSSDDFYLVSIAN

SEQ ID NO: 121926 - protein, 27 aa, Artificial Sequence
  Cyclic GFR-binding peptide
DDMGVPTRHKRLVVNKNEDYYLISTAS

SEQ ID NO: 121927 - protein, 27 aa, Artificial Sequence
  Cyclic GFR-binding peptide
DDMGVPTRHKRLIKPTKGIYYLISTAS

SEQ ID NO: 121928 - protein, 27 aa, Artificial Sequence
  Cyclic GFR-binding peptide
DDMGVPTPIKGYYTVVGKDFYLINIPS

SEQ ID NO: 121929 - protein, 27 aa, Artificial Sequence
  Cyclic GFR-binding peptide
DDMGVPTYHYKLTPVGMDDKYLVSIPS

SEQ ID NO: 121930 - protein, 27 aa, Artificial Sequence
  Cyclic GFR-binding peptide
DDMGVPTRHKRLIVNNSSDYYLVSTAS

SEQ ID NO: 121931 - protein, 27 aa, Artificial Sequence
  Cyclic GFR-binding peptide
DDMGVPTRYKKLLLVRGNDFYLMSIAN

SEQ ID NO: 121932 - protein, 27 aa, Artificial Sequence
  Cyclic GFR-binding peptide
DDMGVPTYHYKLVKPTRGVKYLISIPS

SEQ ID NO: 121933 - protein, 27 aa, Artificial Sequence
  Cyclic GFR-binding peptide
DDMGVPTRHKRLIVNSSDDYYLVSTAS

SEQ ID NO: 121934 - protein, 27 aa, Artificial Sequence
  Cyclic GFR-binding peptide
DDMGVPTPIKGYLLVRGNDFYLMNIPS

SEQ ID NO: 121935 - protein, 27 aa, Artificial Sequence
  Cyclic GFR-binding peptide
DDMGVPTRYKKLVVNKNEDFYLISIAN

SEQ ID NO: 121936 - protein, 27 aa, Artificial Sequence
  Cyclic GFR-binding peptide
DDMGVPTEYKFKVVKDYEDLYLMSIPE

SEQ ID NO: 121937 - protein, 27 aa, Artificial Sequence
  Cyclic GFR-binding peptide
DDMGVPTPIKGYVVNKNEDFYLINIPS

SEQ ID NO: 121938 - protein, 27 aa, Artificial Sequence
  Cyclic GFR-binding peptide
DDMGVPTPIKGYIKPTKGIFYLINIPS

SEQ ID NO: 121939 - protein, 27 aa, Artificial Sequence
  Cyclic GFR-binding peptide
DDMGVPTEYKFKVVNNAADLYLISIPE

SEQ ID NO: 121940 - protein, 27 aa, Artificial Sequence
  Cyclic GFR-binding peptide
DDMGVPTRHKRLYTVVGKDYYLISTAS

SEQ ID NO: 121941 - protein, 27 aa, Artificial Sequence
  Cyclic GFR-binding peptide
DDMGVPTRYKKLIKPTKGIFYLISIAN

SEQ ID NO: 121942 - protein, 27 aa, Artificial Sequence
  Cyclic GFR-binding peptide
DDMGVPTPIKGYVVKDYEDFYLMNIPS

SEQ ID NO: 121943 - protein, 27 aa, Artificial Sequence
  Cyclic GFR-binding peptide
DDMGVPTEYKFKVVNNASDLYLISIPE

SEQ ID NO: 121944 - protein, 27 aa, Artificial Sequence
  Cyclic GFR-binding peptide
DDMGVPTRYKKLVKPTRGVFYLISIAN

SEQ ID NO: 121945 - protein, 27 aa, Artificial Sequence
  Cyclic GFR-binding peptide
DDMGVPTRHKRLVVKENEDYYLMSTAS

SEQ ID NO: 121946 - protein, 27 aa, Artificial Sequence
  Cyclic GFR-binding peptide
DDMGVPTYHYKLIKPTKGIKYLISIPS

SEQ ID NO: 121947 - protein, 27 aa, Artificial Sequence
  Cyclic GFR-binding peptide
DDMGVPTYHYKLVVKENEDKYLMSIPS

SEQ ID NO: 121948 - protein, 27 aa, Artificial Sequence
  Cyclic GFR-binding peptide
DDMGVPTRHKRLIIQQKDNYYLMSTAS

SEQ ID NO: 121949 - protein, 27 aa, Artificial Sequence
  Cyclic GFR-binding peptide
DDMGVPTRYKKLVVKENEDFYLMSIAN

SEQ ID NO: 121950 - protein, 27 aa, Artificial Sequence
  Cyclic GFR-binding peptide
DDMGVPTRYKKLVVNNAADFYLISIAN

SEQ ID NO: 121951 - protein, 27 aa, Artificial Sequence
  Cyclic GFR-binding peptide
DDMGVPTEYKFKIIQQKDNLYLMSIPE

SEQ ID NO: 121952 - protein, 27 aa, Artificial Sequence
  Cyclic GFR-binding peptide
DDMGVPTRYKKLTPVGMDDFYLVSIAN

SEQ ID NO: 121953 - protein, 27 aa, Artificial Sequence
  Cyclic GFR-binding peptide
DDMGVPTYHYKLVVNNAADKYLISIPS

SEQ ID NO: 121954 - protein, 27 aa, Artificial Sequence
  Cyclic GFR-binding peptide
DDMGVPTPIKGYIVNNSSDFYLVNIPS

SEQ ID NO: 121955 - protein, 27 aa, Artificial Sequence
  Cyclic GFR-binding peptide
DDMGVPTPIKGYVKPKRGVFYLINIPS

SEQ ID NO: 121956 - protein, 27 aa, Artificial Sequence
  Cyclic GFR-binding peptide
DDMGVPTRYKKLIIQQKDNFYLMSIAN

SEQ ID NO: 121957 - protein, 27 aa, Artificial Sequence
  Cyclic GFR-binding peptide
DDMGVPTPIKGYIIQQKDNFYLMNIPS

SEQ ID NO: 121958 - protein, 27 aa, Artificial Sequence
  Cyclic GFR-binding peptide
DDMGVPTRYKKLIVNNSSDFYLVSIAN

SEQ ID NO: 121959 - protein, 27 aa, Artificial Sequence
  Cyclic GFR-binding peptide
DDMGVPTPIKGYVVNNAADFYLINIPS

SEQ ID NO: 121960 - protein, 27 aa, Artificial Sequence
  Cyclic GFR-binding peptide
DDMGVPTRHKRLVKPTRGVYYLISTAS

SEQ ID NO: 121961 - protein, 27 aa, Artificial Sequence
  Cyclic GFR-binding peptide
DDMGVPTEYKFKIVNNSSDLYLVSIPE

SEQ ID NO: 121962 - protein, 27 aa, Artificial Sequence
  Cyclic GFR-binding peptide
DDMGVPTRHKRLVVNNASDYYLISTAS

SEQ ID NO: 121963 - protein, 27 aa, Artificial Sequence
  Cyclic GFR-binding peptide
DDMGVPTRHKRLTPVGMDDYYLVSTAS

SEQ ID NO: 121964 - protein, 27 aa, Artificial Sequence
  Cyclic GFR-binding peptide
DDMGVPTYHYKLIVNNSSDKYLVSIPS

SEQ ID NO: 121965 - protein, 27 aa, Artificial Sequence
  Cyclic GFR-binding peptide
DDMGVPTYHYKLVVNNASDKYLISIPS

SEQ ID NO: 121966 - protein, 27 aa, Artificial Sequence
  Cyclic GFR-binding peptide
DDMGVPTEYKFKIVNSSDDLYLVSIPE

SEQ ID NO: 121967 - protein, 27 aa, Artificial Sequence
  Cyclic GFR-binding peptide
DDMGVPTEYKFKVKPKRGVLYLISIPE

SEQ ID NO: 121968 - protein, 27 aa, Artificial Sequence
  Cyclic GFR-binding peptide
DDMGVPTRHKRLVVKDYEDYYLMSTAS

SEQ ID NO: 121969 - protein, 27 aa, Artificial Sequence
  Cyclic GFR-binding peptide
DDMGVPTEYKFKVVKENEDLYLMSIPE

SEQ ID NO: 121970 - protein, 27 aa, Artificial Sequence
  Cyclic GFR-binding peptide
DDMGVPTEYKFKYTVVGKDLYLISIPE

SEQ ID NO: 121971 - protein, 27 aa, Artificial Sequence
  Cyclic GFR-binding peptide
DDMGVPTPIKGYVVNNASDFYLINIPS

SEQ ID NO: 121972 - protein, 27 aa, Artificial Sequence
  Cyclic GFR-binding peptide
DDMGVPTYHYKLIIQQKDNKYLMSIPS

SEQ ID NO: 121973 - protein, 27 aa, Artificial Sequence
  Cyclic GFR-binding peptide
DDMGVPTRYKKLVVNNASDFYLISIAN

SEQ ID NO: 121974 - protein, 27 aa, Artificial Sequence
  Cyclic GFR-binding peptide
DDMGVPTRHKRLVVNNAADYYLISTAS

SEQ ID NO: 121975 - protein, 27 aa, Artificial Sequence
  Cyclic GFR-binding peptide
EPISILYLVGRTPKVKFKYEDDMGVPT

SEQ ID NO: 121976 - protein, 27 aa, Artificial Sequence
  Cyclic GFR-binding peptide
SPISMLYKDEYDKVVLKYHYDDMGVPT

SEQ ID NO: 121977 - protein, 27 aa, Artificial Sequence
  Cyclic GFR-binding peptide
EPISVLYLDDMGVPTKFKYEDDMGVPT

SEQ ID NO: 121978 - protein, 27 aa, Artificial Sequence
  Cyclic GFR-binding peptide
NAISMLYFDEYDKVVLKKYRDDMGVPT

SEQ ID NO: 121979 - protein, 27 aa, Artificial Sequence
  Cyclic GFR-binding peptide
SATSILYYVGRKPKVLRKHRDDMGVPT

SEQ ID NO: 121980 - protein, 27 aa, Artificial Sequence
  Cyclic GFR-binding peptide
SPISILYKVGRKPKVLKYHYDDMGVPT

SEQ ID NO: 121981 - protein, 27 aa, Artificial Sequence
  Cyclic GFR-binding peptide
EPISILYLIGKTPKIKFKYEDDMGVPT

SEQ ID NO: 121982 - protein, 27 aa, Artificial Sequence
  Cyclic GFR-binding peptide
EPISILYLDENKNVVKFKYEDDMGVPT

SEQ ID NO: 121983 - protein, 27 aa, Artificial Sequence
  Cyclic GFR-binding peptide
SPINILYFVGRTPKVYGKIPDDMGVPT

SEQ ID NO: 121984 - protein, 27 aa, Artificial Sequence
  Cyclic GFR-binding peptide
SPINMLYFDENEKVVYGKIPDDMGVPT

SEQ ID NO: 121985 - protein, 27 aa, Artificial Sequence
  Cyclic GFR-binding peptide
SPISILYKDKGVVTYLKYHYDDMGVPT

SEQ ID NO: 121986 - protein, 27 aa, Artificial Sequence
  Cyclic GFR-binding peptide
EPISMLYLDNGRVLLKFKYEDDMGVPT

SEQ ID NO: 121987 - protein, 27 aa, Artificial Sequence
  Cyclic GFR-binding peptide
NAISILYFVGRKPKVLKKYRDDMGVPT

SEQ ID NO: 121988 - protein, 27 aa, Artificial Sequence
  Cyclic GFR-binding peptide
SPINVLYFDDMGVPTYGKIPDDMGVPT

SEQ ID NO: 121989 - protein, 27 aa, Artificial Sequence
  Cyclic GFR-binding peptide
SPISILYKDENKNVVLKYHYDDMGVPT

SEQ ID NO: 121990 - protein, 27 aa, Artificial Sequence
  Cyclic GFR-binding peptide
SPISVLYKDDSSNVILKYHYDDMGVPT

SEQ ID NO: 121991 - protein, 27 aa, Artificial Sequence
  Cyclic GFR-binding peptide
SPINVLYFDDSSNVIYGKIPDDMGVPT

SEQ ID NO: 121992 - protein, 27 aa, Artificial Sequence
  Cyclic GFR-binding peptide
NAISILYFDKGVVTYLKKYRDDMGVPT

SEQ ID NO: 121993 - protein, 27 aa, Artificial Sequence
  Cyclic GFR-binding peptide
SATSMLYYDNGRVLLLRKHRDDMGVPT

SEQ ID NO: 121994 - protein, 27 aa, Artificial Sequence
  Cyclic GFR-binding peptide
SPISMLYKDNGRVLLLKYHYDDMGVPT

SEQ ID NO: 121995 - protein, 27 aa, Artificial Sequence
  Cyclic GFR-binding peptide
NAISVLYFDDSSNVILKKYRDDMGVPT

SEQ ID NO: 121996 - protein, 27 aa, Artificial Sequence
  Cyclic GFR-binding peptide
SATSILYYDENKNVVLRKHRDDMGVPT

SEQ ID NO: 121997 - protein, 27 aa, Artificial Sequence
  Cyclic GFR-binding peptide
SATSILYYIGKTPKILRKHRDDMGVPT

SEQ ID NO: 121998 - protein, 27 aa, Artificial Sequence
  Cyclic GFR-binding peptide
SPINILYFDKGVVTYYGKIPDDMGVPT

SEQ ID NO: 121999 - protein, 27 aa, Artificial Sequence
  Cyclic GFR-binding peptide
SPISVLYKDDMGVPTLKYHYDDMGVPT

SEQ ID NO: 122000 - protein, 27 aa, Artificial Sequence
  Cyclic GFR-binding peptide
SATSVLYYDSSNNVILRKHRDDMGVPT

SEQ ID NO: 122001 - protein, 27 aa, Artificial Sequence
  Cyclic GFR-binding peptide
NAISMLYFDNGRVLLLKKYRDDMGVPT

SEQ ID NO: 122002 - protein, 27 aa, Artificial Sequence
  Cyclic GFR-binding peptide
SPISILYKVGRTPKVLKYHYDDMGVPT

SEQ ID NO: 122003 - protein, 27 aa, Artificial Sequence
  Cyclic GFR-binding peptide
SATSVLYYDDSSNVILRKHRDDMGVPT

SEQ ID NO: 122004 - protein, 27 aa, Artificial Sequence
  Cyclic GFR-binding peptide
SPINMLYFDNGRVLLYGKIPDDMGVPT

SEQ ID NO: 122005 - protein, 27 aa, Artificial Sequence
  Cyclic GFR-binding peptide
NAISILYFDENKNVVLKKYRDDMGVPT

SEQ ID NO: 122006 - protein, 27 aa, Artificial Sequence
  Cyclic GFR-binding peptide
EPISMLYLDEYDKVVKFKYEDDMGVPT

SEQ ID NO: 122007 - protein, 27 aa, Artificial Sequence
  Cyclic GFR-binding peptide
SPINILYFDENKNVVYGKIPDDMGVPT

SEQ ID NO: 122008 - protein, 27 aa, Artificial Sequence
  Cyclic GFR-binding peptide
SPINILYFIGKTPKIYGKIPDDMGVPT

SEQ ID NO: 122009 - protein, 27 aa, Artificial Sequence
  Cyclic GFR-binding peptide
EPISILYLDAANNVVKFKYEDDMGVPT

SEQ ID NO: 122010 - protein, 27 aa, Artificial Sequence
  Cyclic GFR-binding peptide
SATSILYYDKGVVTYLRKHRDDMGVPT

SEQ ID NO: 122011 - protein, 27 aa, Artificial Sequence
  Cyclic GFR-binding peptide
NAISILYFIGKTPKILKKYRDDMGVPT

SEQ ID NO: 122012 - protein, 27 aa, Artificial Sequence
  Cyclic GFR-binding peptide
SPINMLYFDEYDKVVYGKIPDDMGVPT

SEQ ID NO: 122013 - protein, 27 aa, Artificial Sequence
  Cyclic GFR-binding peptide
EPISILYLDSANNVVKFKYEDDMGVPT

SEQ ID NO: 122014 - protein, 27 aa, Artificial Sequence
  Cyclic GFR-binding peptide
NAISILYFVGRTPKVLKKYRDDMGVPT

SEQ ID NO: 122015 - protein, 27 aa, Artificial Sequence
  Cyclic GFR-binding peptide
SATSMLYYDENEKVVLRKHRDDMGVPT

SEQ ID NO: 122016 - protein, 27 aa, Artificial Sequence
  Cyclic GFR-binding peptide
SPISILYKIGKTPKILKYHYDDMGVPT

SEQ ID NO: 122017 - protein, 27 aa, Artificial Sequence
  Cyclic GFR-binding peptide
SPISMLYKDENEKVVLKYHYDDMGVPT

SEQ ID NO: 122018 - protein, 27 aa, Artificial Sequence
  Cyclic GFR-binding peptide
SATSMLYYNDKQQIILRKHRDDMGVPT

SEQ ID NO: 122019 - protein, 27 aa, Artificial Sequence
  Cyclic GFR-binding peptide
NAISMLYFDENEKVVLKKYRDDMGVPT

SEQ ID NO: 122020 - protein, 27 aa, Artificial Sequence
  Cyclic GFR-binding peptide
NAISILYFDAANNVVLKKYRDDMGVPT

SEQ ID NO: 122021 - protein, 27 aa, Artificial Sequence
  Cyclic GFR-binding peptide
EPISMLYLNDKQQIIKFKYEDDMGVPT

SEQ ID NO: 122022 - protein, 27 aa, Artificial Sequence
  Cyclic GFR-binding peptide
NAISVLYFDDMGVPTLKKYRDDMGVPT

SEQ ID NO: 122023 - protein, 27 aa, Artificial Sequence
  Cyclic GFR-binding peptide
SPISILYKDAANNVVLKYHYDDMGVPT

SEQ ID NO: 122024 - protein, 27 aa, Artificial Sequence
  Cyclic GFR-binding peptide
SPINVLYFDSSNNVIYGKIPDDMGVPT

SEQ ID NO: 122025 - protein, 27 aa, Artificial Sequence
  Cyclic GFR-binding peptide
SPINILYFVGRKPKVYGKIPDDMGVPT

SEQ ID NO: 122026 - protein, 27 aa, Artificial Sequence
  Cyclic GFR-binding peptide
NAISMLYFNDKQQIILKKYRDDMGVPT

SEQ ID NO: 122027 - protein, 27 aa, Artificial Sequence
  Cyclic GFR-binding peptide
SPINMLYFNDKQQIIYGKIPDDMGVPT

SEQ ID NO: 122028 - protein, 27 aa, Artificial Sequence
  Cyclic GFR-binding peptide
NAISVLYFDSSNNVILKKYRDDMGVPT

SEQ ID NO: 122029 - protein, 27 aa, Artificial Sequence
  Cyclic GFR-binding peptide
SPINILYFDAANNVVYGKIPDDMGVPT

SEQ ID NO: 122030 - protein, 27 aa, Artificial Sequence
  Cyclic GFR-binding peptide
SATSILYYVGRTPKVLRKHRDDMGVPT

SEQ ID NO: 122031 - protein, 27 aa, Artificial Sequence
  Cyclic GFR-binding peptide
EPISVLYLDSSNNVIKFKYEDDMGVPT

SEQ ID NO: 122032 - protein, 27 aa, Artificial Sequence
  Cyclic GFR-binding peptide
SATSILYYDSANNVVLRKHRDDMGVPT

SEQ ID NO: 122033 - protein, 27 aa, Artificial Sequence
  Cyclic GFR-binding peptide
SATSVLYYDDMGVPTLRKHRDDMGVPT

SEQ ID NO: 122034 - protein, 27 aa, Artificial Sequence
  Cyclic GFR-binding peptide
SPISVLYKDSSNNVILKYHYDDMGVPT

SEQ ID NO: 122035 - protein, 27 aa, Artificial Sequence
  Cyclic GFR-binding peptide
SPISILYKDSANNVVLKYHYDDMGVPT

SEQ ID NO: 122036 - protein, 27 aa, Artificial Sequence
  Cyclic GFR-binding peptide
EPISVLYLDDSSNVIKFKYEDDMGVPT

SEQ ID NO: 122037 - protein, 27 aa, Artificial Sequence
  Cyclic GFR-binding peptide
EPISILYLVGRKPKVKFKYEDDMGVPT

SEQ ID NO: 122038 - protein, 27 aa, Artificial Sequence
  Cyclic GFR-binding peptide
SATSMLYYDEYDKVVLRKHRDDMGVPT

SEQ ID NO: 122039 - protein, 27 aa, Artificial Sequence
  Cyclic GFR-binding peptide
EPISMLYLDENEKVVKFKYEDDMGVPT

SEQ ID NO: 122040 - protein, 27 aa, Artificial Sequence
  Cyclic GFR-binding peptide
EPISILYLDKGVVTYKFKYEDDMGVPT

SEQ ID NO: 122041 - protein, 27 aa, Artificial Sequence
  Cyclic GFR-binding peptide
SPINILYFDSANNVVYGKIPDDMGVPT

SEQ ID NO: 122042 - protein, 27 aa, Artificial Sequence
  Cyclic GFR-binding peptide
SPISMLYKNDKQQIILKYHYDDMGVPT

SEQ ID NO: 122043 - protein, 27 aa, Artificial Sequence
  Cyclic GFR-binding peptide
NAISILYFDSANNVVLKKYRDDMGVPT

SEQ ID NO: 122044 - protein, 27 aa, Artificial Sequence
  Cyclic GFR-binding peptide
SATSILYYDAANNVVLRKHRDDMGVPT

SEQ ID NO: 122045 - protein, 27 aa, Artificial Sequence
  Cyclic GFR-binding peptide
DDMGVPTSMEGIIIQQKDNMIQMTINS

SEQ ID NO: 122046 - protein, 27 aa, Artificial Sequence
  Cyclic GFR-binding peptide
DDMGVPTSMEGIIVNSSDDMIQVTINS

SEQ ID NO: 122047 - protein, 27 aa, Artificial Sequence
  Cyclic GFR-binding peptide
DDMGVPTSMEGLVKPKRGVMIQITINS

SEQ ID NO: 122048 - protein, 27 aa, Artificial Sequence
  Cyclic GFR-binding peptide
DDMGVPTSMEGLVVNNASDMIQITINS

SEQ ID NO: 122049 - protein, 29 aa, Artificial Sequence
  Cyclic GFR-binding peptide
DDMGVPTSMEGIFIPKKRVIEMIQVTINS

SEQ ID NO: 122050 - protein, 27 aa, Artificial Sequence
  Cyclic GFR-binding peptide
DDMGVPTSMEGILLVRGNDMIQMTINS

SEQ ID NO: 122051 - protein, 29 aa, Artificial Sequence
  Cyclic GFR-binding peptide
DDMGVPTSMEGILKPKKRVYEMIQVTINS

SEQ ID NO: 122052 - protein, 27 aa, Artificial Sequence
  Cyclic GFR-binding peptide
DDMGVPTSMEGLIKPTKGIMIQITINS

SEQ ID NO: 122053 - protein, 27 aa, Artificial Sequence
  Cyclic GFR-binding peptide
DDMGVPTSMEGLIVNSSDDMIQVTINS

SEQ ID NO: 122054 - protein, 29 aa, Artificial Sequence
  Cyclic GFR-binding peptide
DDMGVPTSMEGIHQGQHPKIRMIQMTINS

SEQ ID NO: 122055 - protein, 27 aa, Artificial Sequence
  Cyclic GFR-binding peptide
DDMGVPTSMEGIVVNNASDMIQITINS

SEQ ID NO: 122056 - protein, 29 aa, Artificial Sequence
  Cyclic GFR-binding peptide
DDMGVPTSMEGLLKPKKRVYEMIQVTINS

SEQ ID NO: 122057 - protein, 27 aa, Artificial Sequence
  Cyclic GFR-binding peptide
DDMGVPTSMEGIVKPKRGVMIQITINS

SEQ ID NO: 122058 - protein, 27 aa, Artificial Sequence
  Cyclic GFR-binding peptide
DDMGVPTSMEGIVKPTRGVMIQITINS

SEQ ID NO: 122059 - protein, 27 aa, Artificial Sequence
  Cyclic GFR-binding peptide
DDMGVPTSMEGLVVNNAADMIQITINS

SEQ ID NO: 122060 - protein, 27 aa, Artificial Sequence
  Cyclic GFR-binding peptide
DDMGVPTSMEGLLLVRGNDMIQMTINS

SEQ ID NO: 122061 - protein, 27 aa, Artificial Sequence
  Cyclic GFR-binding peptide
DDMGVPTSMEGIIKPTKGIMIQITINS

SEQ ID NO: 122062 - protein, 27 aa, Artificial Sequence
  Cyclic GFR-binding peptide
DDMGVPTSMEGLIIQQKDNMIQMTINS

SEQ ID NO: 122063 - protein, 29 aa, Artificial Sequence
  Cyclic GFR-binding peptide
DDMGVPTSMEGLHQGQHPKIRMIQMTINS

SEQ ID NO: 122064 - protein, 27 aa, Artificial Sequence
  Cyclic GFR-binding peptide
DDMGVPTSMEGIVVNNAADMIQITINS

SEQ ID NO: 122065 - protein, 29 aa, Artificial Sequence
  Cyclic GFR-binding peptide
DDMGVPTSMEGLFIPKKRVIEMIQVTINS

SEQ ID NO: 122066 - protein, 27 aa, Artificial Sequence
  Cyclic GFR-binding peptide
DDMGVPTSMEGLVKPTRGVMIQITINS

SEQ ID NO: 122067 - protein, 27 aa, Artificial Sequence
  Cyclic GFR-binding peptide
SNITMQIMNDKQQIIIGEMSDDMGVPT

SEQ ID NO: 122068 - protein, 27 aa, Artificial Sequence
  Cyclic GFR-binding peptide
SNITVQIMDDSSNVIIGEMSDDMGVPT

SEQ ID NO: 122069 - protein, 27 aa, Artificial Sequence
  Cyclic GFR-binding peptide
SNITIQIMVGRKPKVLGEMSDDMGVPT

SEQ ID NO: 122070 - protein, 27 aa, Artificial Sequence
  Cyclic GFR-binding peptide
SNITIQIMDSANNVVLGEMSDDMGVPT

SEQ ID NO: 122071 - protein, 29 aa, Artificial Sequence
  Cyclic GFR-binding peptide
SNITVQIMEIVRKKPIFIGEMSDDMGVPT

SEQ ID NO: 122072 - protein, 27 aa, Artificial Sequence
  Cyclic GFR-binding peptide
SNITMQIMDNGRVLLIGEMSDDMGVPT

SEQ ID NO: 122073 - protein, 29 aa, Artificial Sequence
  Cyclic GFR-binding peptide
SNITVQIMEYVRKKPKLIGEMSDDMGVPT

SEQ ID NO: 122074 - protein, 27 aa, Artificial Sequence
  Cyclic GFR-binding peptide
SNITIQIMIGKTPKILGEMSDDMGVPT

SEQ ID NO: 122075 - protein, 27 aa, Artificial Sequence
  Cyclic GFR-binding peptide
SNITVQIMDDSSNVILGEMSDDMGVPT

SEQ ID NO: 122076 - protein, 29 aa, Artificial Sequence
  Cyclic GFR-binding peptide
SNITMQIMRIKPHQGQHIGEMSDDMGVPT

SEQ ID NO: 122077 - protein, 27 aa, Artificial Sequence
  Cyclic GFR-binding peptide
SNITIQIMDSANNVVIGEMSDDMGVPT

SEQ ID NO: 122078 - protein, 29 aa, Artificial Sequence
  Cyclic GFR-binding peptide
SNITVQIMEYVRKKPKLLGEMSDDMGVPT

SEQ ID NO: 122079 - protein, 27 aa, Artificial Sequence
  Cyclic GFR-binding peptide
SNITIQIMVGRKPKVIGEMSDDMGVPT

SEQ ID NO: 122080 - protein, 27 aa, Artificial Sequence
  Cyclic GFR-binding peptide
SNITIQIMVGRTPKVIGEMSDDMGVPT

SEQ ID NO: 122081 - protein, 27 aa, Artificial Sequence
  Cyclic GFR-binding peptide
SNITIQIMDAANNVVLGEMSDDMGVPT

SEQ ID NO: 122082 - protein, 27 aa, Artificial Sequence
  Cyclic GFR-binding peptide
SNITMQIMDNGRVLLLGEMSDDMGVPT

SEQ ID NO: 122083 - protein, 27 aa, Artificial Sequence
  Cyclic GFR-binding peptide
SNITIQIMIGKTPKIIGEMSDDMGVPT

SEQ ID NO: 122084 - protein, 27 aa, Artificial Sequence
  Cyclic GFR-binding peptide
SNITMQIMNDKQQIILGEMSDDMGVPT

SEQ ID NO: 122085 - protein, 29 aa, Artificial Sequence
  Cyclic GFR-binding peptide
SNITMQIMRIKPHQGQHLGEMSDDMGVPT

SEQ ID NO: 122086 - protein, 27 aa, Artificial Sequence
  Cyclic GFR-binding peptide
SNITIQIMDAANNVVIGEMSDDMGVPT

SEQ ID NO: 122087 - protein, 29 aa, Artificial Sequence
  Cyclic GFR-binding peptide
SNITVQIMEIVRKKPIFLGEMSDDMGVPT

SEQ ID NO: 122088 - protein, 27 aa, Artificial Sequence
  Cyclic GFR-binding peptide
SNITIQIMVGRTPKVLGEMSDDMGVPT

SEQ ID NO: 122089 - protein, 27 aa, Artificial Sequence
  Cyclic GFR-binding peptide
DDMGVPTRYKKLIKPTKGIFYLISIAN

SEQ ID NO: 122090 - protein, 27 aa, Artificial Sequence
  Cyclic GFR-binding peptide
DDMGVPTQYNKLVVNKNEDLYLISIAS

SEQ ID NO: 122091 - protein, 27 aa, Artificial Sequence
  Cyclic GFR-binding peptide
DDMGVPTQYNKLVVNNAADLYLISIAS

SEQ ID NO: 122092 - protein, 27 aa, Artificial Sequence
  Cyclic GFR-binding peptide
DDMGVPTQYNKLIVNNSSDLYLVSIAS

SEQ ID NO: 122093 - protein, 27 aa, Artificial Sequence
  Cyclic GFR-binding peptide
DDMGVPTRYKKLVVKDYEDFYLMSIAN

SEQ ID NO: 122094 - protein, 27 aa, Artificial Sequence
  Cyclic GFR-binding peptide
DDMGVPTRYKKLVKPTRGVFYLISIAN

SEQ ID NO: 122095 - protein, 27 aa, Artificial Sequence
  Cyclic GFR-binding peptide
DDMGVPTQYNKLIIQQKDNLYLMSIAS

SEQ ID NO: 122096 - protein, 27 aa, Artificial Sequence
  Cyclic GFR-binding peptide
DDMGVPTQYNKLLLVRGNDLYLMSIAS

SEQ ID NO: 122097 - protein, 27 aa, Artificial Sequence
  Cyclic GFR-binding peptide
DDMGVPTQYNKLVKPTRGVLYLISIAS

SEQ ID NO: 122098 - protein, 27 aa, Artificial Sequence
  Cyclic GFR-binding peptide
DDMGVPTRYKKLVVKENEDFYLMSIAN

SEQ ID NO: 122099 - protein, 27 aa, Artificial Sequence
  Cyclic GFR-binding peptide
DDMGVPTRYKKLVVNNAADFYLISIAN

SEQ ID NO: 122100 - protein, 27 aa, Artificial Sequence
  Cyclic GFR-binding peptide
DDMGVPTQYNKLTPVGMDDLYLVSIAS

SEQ ID NO: 122101 - protein, 27 aa, Artificial Sequence
  Cyclic GFR-binding peptide
DDMGVPTRYKKLTPVGMDDFYLVSIAN

SEQ ID NO: 122102 - protein, 27 aa, Artificial Sequence
  Cyclic GFR-binding peptide
DDMGVPTRYKKLVKPKRGVFYLISIAN

SEQ ID NO: 122103 - protein, 27 aa, Artificial Sequence
  Cyclic GFR-binding peptide
DDMGVPTQYNKLVVKENEDLYLMSIAS

SEQ ID NO: 122104 - protein, 27 aa, Artificial Sequence
  Cyclic GFR-binding peptide
DDMGVPTRYKKLIIQQKDNFYLMSIAN

SEQ ID NO: 122105 - protein, 27 aa, Artificial Sequence
  Cyclic GFR-binding peptide
DDMGVPTQYNKLVKPKRGVLYLISIAS

SEQ ID NO: 122106 - protein, 27 aa, Artificial Sequence
  Cyclic GFR-binding peptide
DDMGVPTRYKKLIVNNSSDFYLVSIAN

SEQ ID NO: 122107 - protein, 27 aa, Artificial Sequence
  Cyclic GFR-binding peptide
DDMGVPTRYKKLYTVVGKDFYLISIAN

SEQ ID NO: 122108 - protein, 27 aa, Artificial Sequence
  Cyclic GFR-binding peptide
DDMGVPTRYKKLIVNSSDDFYLVSIAN

SEQ ID NO: 122109 - protein, 27 aa, Artificial Sequence
  Cyclic GFR-binding peptide
DDMGVPTRYKKLLLVRGNDFYLMSIAN

SEQ ID NO: 122110 - protein, 27 aa, Artificial Sequence
  Cyclic GFR-binding peptide
DDMGVPTQYNKLVVNNASDLYLISIAS

SEQ ID NO: 122111 - protein, 27 aa, Artificial Sequence
  Cyclic GFR-binding peptide
DDMGVPTQYNKLIKPTKGILYLISIAS

SEQ ID NO: 122112 - protein, 27 aa, Artificial Sequence
  Cyclic GFR-binding peptide
DDMGVPTRYKKLVVNKNEDFYLISIAN

SEQ ID NO: 122113 - protein, 27 aa, Artificial Sequence
  Cyclic GFR-binding peptide
DDMGVPTQYNKLYTVVGKDLYLISIAS

SEQ ID NO: 122114 - protein, 27 aa, Artificial Sequence
  Cyclic GFR-binding peptide
DDMGVPTQYNKLVVKDYEDLYLMSIAS

SEQ ID NO: 122115 - protein, 27 aa, Artificial Sequence
  Cyclic GFR-binding peptide
DDMGVPTRYKKLVVNNASDFYLISIAN

SEQ ID NO: 122116 - protein, 27 aa, Artificial Sequence
  Cyclic GFR-binding peptide
DDMGVPTQYNKLIVNSSDDLYLVSIAS

SEQ ID NO: 122117 - protein, 27 aa, Artificial Sequence
  Cyclic GFR-binding peptide
NAISILYFIGKTPKILKKYRDDMGVPT

SEQ ID NO: 122118 - protein, 27 aa, Artificial Sequence
  Cyclic GFR-binding peptide
SAISILYLDENKNVVLKNYQDDMGVPT

SEQ ID NO: 122119 - protein, 27 aa, Artificial Sequence
  Cyclic GFR-binding peptide
SAISILYLDAANNVVLKNYQDDMGVPT

SEQ ID NO: 122120 - protein, 27 aa, Artificial Sequence
  Cyclic GFR-binding peptide
SAISVLYLDSSNNVILKNYQDDMGVPT

SEQ ID NO: 122121 - protein, 27 aa, Artificial Sequence
  Cyclic GFR-binding peptide
NAISMLYFDEYDKVVLKKYRDDMGVPT

SEQ ID NO: 122122 - protein, 27 aa, Artificial Sequence
  Cyclic GFR-binding peptide
NAISILYFVGRTPKVLKKYRDDMGVPT

SEQ ID NO: 122123 - protein, 27 aa, Artificial Sequence
  Cyclic GFR-binding peptide
SAISMLYLNDKQQIILKNYQDDMGVPT

SEQ ID NO: 122124 - protein, 27 aa, Artificial Sequence
  Cyclic GFR-binding peptide
SAISMLYLDNGRVLLLKNYQDDMGVPT

SEQ ID NO: 122125 - protein, 27 aa, Artificial Sequence
  Cyclic GFR-binding peptide
SAISILYLVGRTPKVLKNYQDDMGVPT

SEQ ID NO: 122126 - protein, 27 aa, Artificial Sequence
  Cyclic GFR-binding peptide
NAISMLYFDENEKVVLKKYRDDMGVPT

SEQ ID NO: 122127 - protein, 27 aa, Artificial Sequence
  Cyclic GFR-binding peptide
NAISILYFDAANNVVLKKYRDDMGVPT

SEQ ID NO: 122128 - protein, 27 aa, Artificial Sequence
  Cyclic GFR-binding peptide
SAISVLYLDDMGVPTLKNYQDDMGVPT

SEQ ID NO: 122129 - protein, 27 aa, Artificial Sequence
  Cyclic GFR-binding peptide
NAISVLYFDDMGVPTLKKYRDDMGVPT

SEQ ID NO: 122130 - protein, 27 aa, Artificial Sequence
  Cyclic GFR-binding peptide
NAISILYFVGRKPKVLKKYRDDMGVPT

SEQ ID NO: 122131 - protein, 27 aa, Artificial Sequence
  Cyclic GFR-binding peptide
SAISMLYLDENEKVVLKNYQDDMGVPT

SEQ ID NO: 122132 - protein, 27 aa, Artificial Sequence
  Cyclic GFR-binding peptide
NAISMLYFNDKQQIILKKYRDDMGVPT

SEQ ID NO: 122133 - protein, 27 aa, Artificial Sequence
  Cyclic GFR-binding peptide
SAISILYLVGRKPKVLKNYQDDMGVPT

SEQ ID NO: 122134 - protein, 27 aa, Artificial Sequence
  Cyclic GFR-binding peptide
NAISVLYFDSSNNVILKKYRDDMGVPT

SEQ ID NO: 122135 - protein, 27 aa, Artificial Sequence
  Cyclic GFR-binding peptide
NAISILYFDKGVVTYLKKYRDDMGVPT

SEQ ID NO: 122136 - protein, 27 aa, Artificial Sequence
  Cyclic GFR-binding peptide
NAISVLYFDDSSNVILKKYRDDMGVPT

SEQ ID NO: 122137 - protein, 27 aa, Artificial Sequence
  Cyclic GFR-binding peptide
NAISMLYFDNGRVLLLKKYRDDMGVPT

SEQ ID NO: 122138 - protein, 27 aa, Artificial Sequence
  Cyclic GFR-binding peptide
SAISILYLDSANNVVLKNYQDDMGVPT

SEQ ID NO: 122139 - protein, 27 aa, Artificial Sequence
  Cyclic GFR-binding peptide
SAISILYLIGKTPKILKNYQDDMGVPT

SEQ ID NO: 122140 - protein, 27 aa, Artificial Sequence
  Cyclic GFR-binding peptide
NAISILYFDENKNVVLKKYRDDMGVPT

SEQ ID NO: 122141 - protein, 27 aa, Artificial Sequence
  Cyclic GFR-binding peptide
SAISILYLDKGVVTYLKNYQDDMGVPT

SEQ ID NO: 122142 - protein, 27 aa, Artificial Sequence
  Cyclic GFR-binding peptide
SAISMLYLDEYDKVVLKNYQDDMGVPT

SEQ ID NO: 122143 - protein, 27 aa, Artificial Sequence
  Cyclic GFR-binding peptide
NAISILYFDSANNVVLKKYRDDMGVPT

SEQ ID NO: 122144 - protein, 27 aa, Artificial Sequence
  Cyclic GFR-binding peptide
SAISVLYLDDSSNVILKNYQDDMGVPT

SEQ ID NO: 122145 - protein, 29 aa, Artificial Sequence
  Cyclic GFR-binding peptide
DDMGVPTVTAKKLKPKKRVYEIKRVQVPR

SEQ ID NO: 122146 - protein, 29 aa, Artificial Sequence
  Cyclic GFR-binding peptide
DDMGVPTVQVEKLKPKKRVYEVKAVKVSR

SEQ ID NO: 122147 - protein, 27 aa, Artificial Sequence
  Cyclic GFR-binding peptide
DDMGVPTVTAKKVKPTRGVIKRIQVPR

SEQ ID NO: 122148 - protein, 29 aa, Artificial Sequence
  Cyclic GFR-binding peptide
DDMGVPTVQVEKFIPKKRVIEVKAVKVSR

SEQ ID NO: 122149 - protein, 29 aa, Artificial Sequence
  Cyclic GFR-binding peptide
DDMGVPTVQVEKHQGQHPKIRVKAMKVSR

SEQ ID NO: 122150 - protein, 29 aa, Artificial Sequence
  Cyclic GFR-binding peptide
DDMGVPTVTAKKHQGQHPKIRIKRMQVPR

SEQ ID NO: 122151 - protein, 27 aa, Artificial Sequence
  Cyclic GFR-binding peptide
DDMGVPTVTAKKIKPTKGIIKRIQVPR

SEQ ID NO: 122152 - protein, 27 aa, Artificial Sequence
  Cyclic GFR-binding peptide
DDMGVPTVQVEKVKPKRGVVKAIKVSR

SEQ ID NO: 122153 - protein, 27 aa, Artificial Sequence
  Cyclic GFR-binding peptide
DDMGVPTVTAKKVKPKRGVIKRIQVPR

SEQ ID NO: 122154 - protein, 27 aa, Artificial Sequence
  Cyclic GFR-binding peptide
DDMGVPTVQVEKIKPTKGIVKAIKVSR

SEQ ID NO: 122155 - protein, 27 aa, Artificial Sequence
  Cyclic GFR-binding peptide
DDMGVPTVQVEKVKPTRGVVKAIKVSR

SEQ ID NO: 122156 - protein, 29 aa, Artificial Sequence
  Cyclic GFR-binding peptide
DDMGVPTVTAKKFIPKKRVIEIKRVQVPR

SEQ ID NO: 122157 - protein, 29 aa, Artificial Sequence
  Cyclic GFR-binding peptide
RPVQVRKIEYVRKKPKLKKATVDDMGVPT

SEQ ID NO: 122158 - protein, 29 aa, Artificial Sequence
  Cyclic GFR-binding peptide
RSVKVAKVEYVRKKPKLKEVQVDDMGVPT

SEQ ID NO: 122159 - protein, 27 aa, Artificial Sequence
  Cyclic GFR-binding peptide
RPVQIRKIVGRTPKVKKATVDDMGVPT

SEQ ID NO: 122160 - protein, 29 aa, Artificial Sequence
  Cyclic GFR-binding peptide
RSVKVAKVEIVRKKPIFKEVQVDDMGVPT

SEQ ID NO: 122161 - protein, 29 aa, Artificial Sequence
  Cyclic GFR-binding peptide
RSVKMAKVRIKPHQGQHKEVQVDDMGVPT

SEQ ID NO: 122162 - protein, 29 aa, Artificial Sequence
  Cyclic GFR-binding peptide
RPVQMRKIRIKPHQGQHKKATVDDMGVPT

SEQ ID NO: 122163 - protein, 27 aa, Artificial Sequence
  Cyclic GFR-binding peptide
RPVQIRKIIGKTPKIKKATVDDMGVPT

SEQ ID NO: 122164 - protein, 27 aa, Artificial Sequence
  Cyclic GFR-binding peptide
RSVKIAKVVGRKPKVKEVQVDDMGVPT

SEQ ID NO: 122165 - protein, 27 aa, Artificial Sequence
  Cyclic GFR-binding peptide
RPVQIRKIVGRKPKVKKATVDDMGVPT

SEQ ID NO: 122166 - protein, 27 aa, Artificial Sequence
  Cyclic GFR-binding peptide
RSVKIAKVIGKTPKIKEVQVDDMGVPT

SEQ ID NO: 122167 - protein, 27 aa, Artificial Sequence
  Cyclic GFR-binding peptide
RSVKIAKVVGRTPKVKEVQVDDMGVPT

SEQ ID NO: 122168 - protein, 29 aa, Artificial Sequence
  Cyclic GFR-binding peptide
RPVQVRKIEIVRKKPIFKKATVDDMGVPT

SEQ ID NO: 122169 - protein, 27 aa, Artificial Sequence
  Cyclic GFR-binding peptide
DKGVVTYRYKKLIKPTKGIFYLISIAN

SEQ ID NO: 122170 - protein, 29 aa, Artificial Sequence
  Cyclic GFR-binding peptide
DKGVVTYRHKRLFIPKKRVIEYYLVSTAS

SEQ ID NO: 122171 - protein, 27 aa, Artificial Sequence
  Cyclic GFR-binding peptide
DKGVVTYYHYKLVVKDYEDKYLMSIPS

SEQ ID NO: 122172 - protein, 27 aa, Artificial Sequence
  Cyclic GFR-binding peptide
DKGVVTYQYNKLIVNNSSDLYLVSIAS

SEQ ID NO: 122173 - protein, 27 aa, Artificial Sequence
  Cyclic GFR-binding peptide
DKGVVTYRYKKLVVKDYEDFYLMSIAN

SEQ ID NO: 122174 - protein, 27 aa, Artificial Sequence
  Cyclic GFR-binding peptide
DKGVVTYRYKKLVKPTRGVFYLISIAN

SEQ ID NO: 122175 - protein, 27 aa, Artificial Sequence
  Cyclic GFR-binding peptide
DKGVVTYRHKRLVVKENEDYYLMSTAS

SEQ ID NO: 122176 - protein, 27 aa, Artificial Sequence
  Cyclic GFR-binding peptide
DKGVVTYYHYKLIKPTKGIKYLISIPS

SEQ ID NO: 122177 - protein, 29 aa, Artificial Sequence
  Cyclic GFR-binding peptide
DKGVVTYRYKKLFIPKKRVIEFYLVSIAN

SEQ ID NO: 122178 - protein, 27 aa, Artificial Sequence
  Cyclic GFR-binding peptide
DKGVVTYYHYKLVVKENEDKYLMSIPS

SEQ ID NO: 122179 - protein, 27 aa, Artificial Sequence
  Cyclic GFR-binding peptide
DKGVVTYRHKRLVKPKRGVYYLISTAS

SEQ ID NO: 122180 - protein, 27 aa, Artificial Sequence
  Cyclic GFR-binding peptide
DKGVVTYYHYKLVKPKRGVKYLISIPS

SEQ ID NO: 122181 - protein, 29 aa, Artificial Sequence
  Cyclic GFR-binding peptide
DKGVVTYQYNKLFIPKKRVIELYLVSIAS

SEQ ID NO: 122182 - protein, 27 aa, Artificial Sequence
  Cyclic GFR-binding peptide
DKGVVTYQYNKLVKPTRGVLYLISIAS

SEQ ID NO: 122183 - protein, 27 aa, Artificial Sequence
  Cyclic GFR-binding peptide
DKGVVTYRYKKLVVKENEDFYLMSIAN

SEQ ID NO: 122184 - protein, 27 aa, Artificial Sequence
  Cyclic GFR-binding peptide
DKGVVTYQYNKLTPVGMDDLYLVSIAS

SEQ ID NO: 122185 - protein, 27 aa, Artificial Sequence
  Cyclic GFR-binding peptide
DKGVVTYRYKKLTPVGMDDFYLVSIAN

SEQ ID NO: 122186 - protein, 27 aa, Artificial Sequence
  Cyclic GFR-binding peptide
DKGVVTYRYKKLVKPKRGVFYLISIAN

SEQ ID NO: 122187 - protein, 27 aa, Artificial Sequence
  Cyclic GFR-binding peptide
DKGVVTYQYNKLVVKENEDLYLMSIAS

SEQ ID NO: 122188 - protein, 27 aa, Artificial Sequence
  Cyclic GFR-binding peptide
DKGVVTYYHYKLIVNSSDDKYLVSIPS

SEQ ID NO: 122189 - protein, 27 aa, Artificial Sequence
  Cyclic GFR-binding peptide
DKGVVTYQYNKLVKPKRGVLYLISIAS

SEQ ID NO: 122190 - protein, 27 aa, Artificial Sequence
  Cyclic GFR-binding peptide
DKGVVTYRYKKLIVNNSSDFYLVSIAN

SEQ ID NO: 122191 - protein, 27 aa, Artificial Sequence
  Cyclic GFR-binding peptide
DKGVVTYRYKKLIVNSSDDFYLVSIAN

SEQ ID NO: 122192 - protein, 27 aa, Artificial Sequence
  Cyclic GFR-binding peptide
DKGVVTYRHKRLVKPTRGVYYLISTAS

SEQ ID NO: 122193 - protein, 29 aa, Artificial Sequence
  Cyclic GFR-binding peptide
DKGVVTYYHYKLFIPKKRVIEKYLVSIPS

SEQ ID NO: 122194 - protein, 27 aa, Artificial Sequence
  Cyclic GFR-binding peptide
DKGVVTYRHKRLIKPTKGIYYLISTAS

SEQ ID NO: 122195 - protein, 27 aa, Artificial Sequence
  Cyclic GFR-binding peptide
DKGVVTYRHKRLTPVGMDDYYLVSTAS

SEQ ID NO: 122196 - protein, 27 aa, Artificial Sequence
  Cyclic GFR-binding peptide
DKGVVTYYHYKLTPVGMDDKYLVSIPS

SEQ ID NO: 122197 - protein, 27 aa, Artificial Sequence
  Cyclic GFR-binding peptide
DKGVVTYYHYKLIVNNSSDKYLVSIPS

SEQ ID NO: 122198 - protein, 27 aa, Artificial Sequence
  Cyclic GFR-binding peptide
DKGVVTYRHKRLIVNNSSDYYLVSTAS

SEQ ID NO: 122199 - protein, 27 aa, Artificial Sequence
  Cyclic GFR-binding peptide
DKGVVTYYHYKLVKPTRGVKYLISIPS

SEQ ID NO: 122200 - protein, 27 aa, Artificial Sequence
  Cyclic GFR-binding peptide
DKGVVTYRHKRLIVNSSDDYYLVSTAS

SEQ ID NO: 122201 - protein, 27 aa, Artificial Sequence
  Cyclic GFR-binding peptide
DKGVVTYRHKRLVVKDYEDYYLMSTAS

SEQ ID NO: 122202 - protein, 27 aa, Artificial Sequence
  Cyclic GFR-binding peptide
DKGVVTYQYNKLIKPTKGILYLISIAS

SEQ ID NO: 122203 - protein, 27 aa, Artificial Sequence
  Cyclic GFR-binding peptide
DKGVVTYQYNKLVVKDYEDLYLMSIAS

SEQ ID NO: 122204 - protein, 27 aa, Artificial Sequence
  Cyclic GFR-binding peptide
DKGVVTYQYNKLIVNSSDDLYLVSIAS

SEQ ID NO: 122205 - protein, 27 aa, Artificial Sequence
  Cyclic GFR-binding peptide
NAISILYFIGKTPKILKKYRDKGVVTY

SEQ ID NO: 122206 - protein, 29 aa, Artificial Sequence
  Cyclic GFR-binding peptide
SATSVLYYEIVRKKPIFLRKHRDKGVVTY

SEQ ID NO: 122207 - protein, 27 aa, Artificial Sequence
  Cyclic GFR-binding peptide
SPISMLYKDEYDKVVLKYHYDKGVVTY

SEQ ID NO: 122208 - protein, 27 aa, Artificial Sequence
  Cyclic GFR-binding peptide
SAISVLYLDSSNNVILKNYQDKGVVTY

SEQ ID NO: 122209 - protein, 27 aa, Artificial Sequence
  Cyclic GFR-binding peptide
NAISMLYFDEYDKVVLKKYRDKGVVTY

SEQ ID NO: 122210 - protein, 27 aa, Artificial Sequence
  Cyclic GFR-binding peptide
NAISILYFVGRTPKVLKKYRDKGVVTY

SEQ ID NO: 122211 - protein, 27 aa, Artificial Sequence
  Cyclic GFR-binding peptide
SATSMLYYDENEKVVLRKHRDKGVVTY

SEQ ID NO: 122212 - protein, 27 aa, Artificial Sequence
  Cyclic GFR-binding peptide
SPISILYKIGKTPKILKYHYDKGVVTY

SEQ ID NO: 122213 - protein, 29 aa, Artificial Sequence
  Cyclic GFR-binding peptide
NAISVLYFEIVRKKPIFLKKYRDKGVVTY

SEQ ID NO: 122214 - protein, 27 aa, Artificial Sequence
  Cyclic GFR-binding peptide
SPISMLYKDENEKVVLKYHYDKGVVTY

SEQ ID NO: 122215 - protein, 27 aa, Artificial Sequence
  Cyclic GFR-binding peptide
SATSILYYVGRKPKVLRKHRDKGVVTY

SEQ ID NO: 122216 - protein, 27 aa, Artificial Sequence
  Cyclic GFR-binding peptide
SPISILYKVGRKPKVLKYHYDKGVVTY

SEQ ID NO: 122217 - protein, 29 aa, Artificial Sequence
  Cyclic GFR-binding peptide
SAISVLYLEIVRKKPIFLKNYQDKGVVTY

SEQ ID NO: 122218 - protein, 27 aa, Artificial Sequence
  Cyclic GFR-binding peptide
SAISILYLVGRTPKVLKNYQDKGVVTY

SEQ ID NO: 122219 - protein, 27 aa, Artificial Sequence
  Cyclic GFR-binding peptide
NAISMLYFDENEKVVLKKYRDKGVVTY

SEQ ID NO: 122220 - protein, 27 aa, Artificial Sequence
  Cyclic GFR-binding peptide
SAISVLYLDDMGVPTLKNYQDKGVVTY

SEQ ID NO: 122221 - protein, 27 aa, Artificial Sequence
  Cyclic GFR-binding peptide
NAISVLYFDDMGVPTLKKYRDKGVVTY

SEQ ID NO: 122222 - protein, 27 aa, Artificial Sequence
  Cyclic GFR-binding peptide
NAISILYFVGRKPKVLKKYRDKGVVTY

SEQ ID NO: 122223 - protein, 27 aa, Artificial Sequence
  Cyclic GFR-binding peptide
SAISMLYLDENEKVVLKNYQDKGVVTY

SEQ ID NO: 122224 - protein, 27 aa, Artificial Sequence
  Cyclic GFR-binding peptide
SPISVLYKDDSSNVILKYHYDKGVVTY

SEQ ID NO: 122225 - protein, 27 aa, Artificial Sequence
  Cyclic GFR-binding peptide
SAISILYLVGRKPKVLKNYQDKGVVTY

SEQ ID NO: 122226 - protein, 27 aa, Artificial Sequence
  Cyclic GFR-binding peptide
NAISVLYFDSSNNVILKKYRDKGVVTY

SEQ ID NO: 122227 - protein, 27 aa, Artificial Sequence
  Cyclic GFR-binding peptide
NAISVLYFDDSSNVILKKYRDKGVVTY

SEQ ID NO: 122228 - protein, 27 aa, Artificial Sequence
  Cyclic GFR-binding peptide
SATSILYYVGRTPKVLRKHRDKGVVTY

SEQ ID NO: 122229 - protein, 29 aa, Artificial Sequence
  Cyclic GFR-binding peptide
SPISVLYKEIVRKKPIFLKYHYDKGVVTY

SEQ ID NO: 122230 - protein, 27 aa, Artificial Sequence
  Cyclic GFR-binding peptide
SATSILYYIGKTPKILRKHRDKGVVTY

SEQ ID NO: 122231 - protein, 27 aa, Artificial Sequence
  Cyclic GFR-binding peptide
SATSVLYYDDMGVPTLRKHRDKGVVTY

SEQ ID NO: 122232 - protein, 27 aa, Artificial Sequence
  Cyclic GFR-binding peptide
SPISVLYKDDMGVPTLKYHYDKGVVTY

SEQ ID NO: 122233 - protein, 27 aa, Artificial Sequence
  Cyclic GFR-binding peptide
SPISVLYKDSSNNVILKYHYDKGVVTY

SEQ ID NO: 122234 - protein, 27 aa, Artificial Sequence
  Cyclic GFR-binding peptide
SATSVLYYDSSNNVILRKHRDKGVVTY

SEQ ID NO: 122235 - protein, 27 aa, Artificial Sequence
  Cyclic GFR-binding peptide
SPISILYKVGRTPKVLKYHYDKGVVTY

SEQ ID NO: 122236 - protein, 27 aa, Artificial Sequence
  Cyclic GFR-binding peptide
SATSVLYYDDSSNVILRKHRDKGVVTY

SEQ ID NO: 122237 - protein, 27 aa, Artificial Sequence
  Cyclic GFR-binding peptide
SATSMLYYDEYDKVVLRKHRDKGVVTY

SEQ ID NO: 122238 - protein, 27 aa, Artificial Sequence
  Cyclic GFR-binding peptide
SAISILYLIGKTPKILKNYQDKGVVTY

SEQ ID NO: 122239 - protein, 27 aa, Artificial Sequence
  Cyclic GFR-binding peptide
SAISMLYLDEYDKVVLKNYQDKGVVTY

SEQ ID NO: 122240 - protein, 27 aa, Artificial Sequence
  Cyclic GFR-binding peptide
SAISVLYLDDSSNVILKNYQDKGVVTY

SEQ ID NO: 122241 - protein, 27 aa, Artificial Sequence
  Cyclic GFR-binding peptide
DKGVVTYRYKKLIKPTKGIFYLISIAN

SEQ ID NO: 122242 - protein, 27 aa, Artificial Sequence
  Cyclic GFR-binding peptide
DKGVVTYNSLQEVVKDYEDYYLMTLPE

SEQ ID NO: 122243 - protein, 27 aa, Artificial Sequence
  Cyclic GFR-binding peptide
DKGVVTYNSLQEIKPTKGIYYVIPLPE

SEQ ID NO: 122244 - protein, 27 aa, Artificial Sequence
  Cyclic GFR-binding peptide
DKGVVTYNSLQEVKPKRGVYYLITLPE

SEQ ID NO: 122245 - protein, 27 aa, Artificial Sequence
  Cyclic GFR-binding peptide
DKGVVTYNSLQEVKPTRGVYYVIPLPE

SEQ ID NO: 122246 - protein, 27 aa, Artificial Sequence
  Cyclic GFR-binding peptide
DKGVVTYRYKKLVVKDYEDFYLMSIAN

SEQ ID NO: 122247 - protein, 27 aa, Artificial Sequence
  Cyclic GFR-binding peptide
DKGVVTYEYQKYIVNSSDDIFLVSIPS

SEQ ID NO: 122248 - protein, 27 aa, Artificial Sequence
  Cyclic GFR-binding peptide
DKGVVTYEYQKYVKPTRGVIFLISIPS

SEQ ID NO: 122249 - protein, 27 aa, Artificial Sequence
  Cyclic GFR-binding peptide
DKGVVTYNSLQEVVKENEDYYLMTLPE

SEQ ID NO: 122250 - protein, 27 aa, Artificial Sequence
  Cyclic GFR-binding peptide
DKGVVTYRYKKLVKPTRGVFYLISIAN

SEQ ID NO: 122251 - protein, 27 aa, Artificial Sequence
  Cyclic GFR-binding peptide
DKGVVTYNSLQEVVNNASDYYLITLPE

SEQ ID NO: 122252 - protein, 27 aa, Artificial Sequence
  Cyclic GFR-binding peptide
DKGVVTYNSLQEVKPKRGVYYVIPLPE

SEQ ID NO: 122253 - protein, 27 aa, Artificial Sequence
  Cyclic GFR-binding peptide
DKGVVTYNSLQEVVNNASDYYVIPLPE

SEQ ID NO: 122254 - protein, 27 aa, Artificial Sequence
  Cyclic GFR-binding peptide
DKGVVTYNSLQEVKPTRGVYYLITLPE

SEQ ID NO: 122255 - protein, 27 aa, Artificial Sequence
  Cyclic GFR-binding peptide
DKGVVTYQYNKLVKPTRGVLYLISIAS

SEQ ID NO: 122256 - protein, 27 aa, Artificial Sequence
  Cyclic GFR-binding peptide
DKGVVTYRYKKLVVKENEDFYLMSIAN

SEQ ID NO: 122257 - protein, 27 aa, Artificial Sequence
  Cyclic GFR-binding peptide
DKGVVTYEYQKYIKPTKGIIFLISIPS

SEQ ID NO: 122258 - protein, 27 aa, Artificial Sequence
  Cyclic GFR-binding peptide
DKGVVTYEYQKYVVNNASDIFLISIPS

SEQ ID NO: 122259 - protein, 27 aa, Artificial Sequence
  Cyclic GFR-binding peptide
DKGVVTYRYKKLVKPKRGVFYLISIAN

SEQ ID NO: 122260 - protein, 27 aa, Artificial Sequence
  Cyclic GFR-binding peptide
DKGVVTYNSLQEIVNSSDDYYVVPLPE

SEQ ID NO: 122261 - protein, 27 aa, Artificial Sequence
  Cyclic GFR-binding peptide
DKGVVTYNSLQEVVKDYEDYYVMPLPE

SEQ ID NO: 122262 - protein, 27 aa, Artificial Sequence
  Cyclic GFR-binding peptide
DKGVVTYQYNKLVVKENEDLYLMSIAS

SEQ ID NO: 122263 - protein, 27 aa, Artificial Sequence
  Cyclic GFR-binding peptide
DKGVVTYEYQKYVVKENEDIFLMSIPS

SEQ ID NO: 122264 - protein, 27 aa, Artificial Sequence
  Cyclic GFR-binding peptide
DKGVVTYQYNKLVKPKRGVLYLISIAS

SEQ ID NO: 122265 - protein, 27 aa, Artificial Sequence
  Cyclic GFR-binding peptide
DKGVVTYRYKKLIVNSSDDFYLVSIAN

SEQ ID NO: 122266 - protein, 27 aa, Artificial Sequence
  Cyclic GFR-binding peptide
DKGVVTYNSLQEVVKENEDYYVMPLPE

SEQ ID NO: 122267 - protein, 27 aa, Artificial Sequence
  Cyclic GFR-binding peptide
DKGVVTYEYQKYVVKDYEDIFLMSIPS

SEQ ID NO: 122268 - protein, 27 aa, Artificial Sequence
  Cyclic GFR-binding peptide
DKGVVTYQYNKLVVNNASDLYLISIAS

SEQ ID NO: 122269 - protein, 27 aa, Artificial Sequence
  Cyclic GFR-binding peptide
DKGVVTYQYNKLIKPTKGILYLISIAS

SEQ ID NO: 122270 - protein, 27 aa, Artificial Sequence
  Cyclic GFR-binding peptide
DKGVVTYNSLQEIKPTKGIYYLITLPE

SEQ ID NO: 122271 - protein, 27 aa, Artificial Sequence
  Cyclic GFR-binding peptide
DKGVVTYEYQKYVKPKRGVIFLISIPS

SEQ ID NO: 122272 - protein, 27 aa, Artificial Sequence
  Cyclic GFR-binding peptide
DKGVVTYQYNKLVVKDYEDLYLMSIAS

SEQ ID NO: 122273 - protein, 27 aa, Artificial Sequence
  Cyclic GFR-binding peptide
DKGVVTYRYKKLVVNNASDFYLISIAN

SEQ ID NO: 122274 - protein, 27 aa, Artificial Sequence
  Cyclic GFR-binding peptide
DKGVVTYNSLQEIVNSSDDYYLVTLPE

SEQ ID NO: 122275 - protein, 27 aa, Artificial Sequence
  Cyclic GFR-binding peptide
DKGVVTYQYNKLIVNSSDDLYLVSIAS

SEQ ID NO: 122276 - protein, 27 aa, Artificial Sequence
  Cyclic GFR-binding peptide
NAISILYFIGKTPKILKKYRDKGVVTY

SEQ ID NO: 122277 - protein, 27 aa, Artificial Sequence
  Cyclic GFR-binding peptide
EPLTMLYYDEYDKVVEQLSNDKGVVTY

SEQ ID NO: 122278 - protein, 27 aa, Artificial Sequence
  Cyclic GFR-binding peptide
EPLPIVYYIGKTPKIEQLSNDKGVVTY

SEQ ID NO: 122279 - protein, 27 aa, Artificial Sequence
  Cyclic GFR-binding peptide
EPLTILYYVGRKPKVEQLSNDKGVVTY

SEQ ID NO: 122280 - protein, 27 aa, Artificial Sequence
  Cyclic GFR-binding peptide
EPLPIVYYVGRTPKVEQLSNDKGVVTY

SEQ ID NO: 122281 - protein, 27 aa, Artificial Sequence
  Cyclic GFR-binding peptide
NAISMLYFDEYDKVVLKKYRDKGVVTY

SEQ ID NO: 122282 - protein, 27 aa, Artificial Sequence
  Cyclic GFR-binding peptide
SPISVLFIDDSSNVIYKQYEDKGVVTY

SEQ ID NO: 122283 - protein, 27 aa, Artificial Sequence
  Cyclic GFR-binding peptide
SPISILFIVGRTPKVYKQYEDKGVVTY

SEQ ID NO: 122284 - protein, 27 aa, Artificial Sequence
  Cyclic GFR-binding peptide
EPLTMLYYDENEKVVEQLSNDKGVVTY

SEQ ID NO: 122285 - protein, 27 aa, Artificial Sequence
  Cyclic GFR-binding peptide
NAISILYFVGRTPKVLKKYRDKGVVTY

SEQ ID NO: 122286 - protein, 27 aa, Artificial Sequence
  Cyclic GFR-binding peptide
EPLTILYYDSANNVVEQLSNDKGVVTY

SEQ ID NO: 122287 - protein, 27 aa, Artificial Sequence
  Cyclic GFR-binding peptide
EPLPIVYYVGRKPKVEQLSNDKGVVTY

SEQ ID NO: 122288 - protein, 27 aa, Artificial Sequence
  Cyclic GFR-binding peptide
EPLPIVYYDSANNVVEQLSNDKGVVTY

SEQ ID NO: 122289 - protein, 27 aa, Artificial Sequence
  Cyclic GFR-binding peptide
EPLTILYYVGRTPKVEQLSNDKGVVTY

SEQ ID NO: 122290 - protein, 27 aa, Artificial Sequence
  Cyclic GFR-binding peptide
SAISILYLVGRTPKVLKNYQDKGVVTY

SEQ ID NO: 122291 - protein, 27 aa, Artificial Sequence
  Cyclic GFR-binding peptide
NAISMLYFDENEKVVLKKYRDKGVVTY

SEQ ID NO: 122292 - protein, 27 aa, Artificial Sequence
  Cyclic GFR-binding peptide
SPISILFIIGKTPKIYKQYEDKGVVTY

SEQ ID NO: 122293 - protein, 27 aa, Artificial Sequence
  Cyclic GFR-binding peptide
SPISILFIDSANNVVYKQYEDKGVVTY

SEQ ID NO: 122294 - protein, 27 aa, Artificial Sequence
  Cyclic GFR-binding peptide
NAISILYFVGRKPKVLKKYRDKGVVTY

SEQ ID NO: 122295 - protein, 27 aa, Artificial Sequence
  Cyclic GFR-binding peptide
EPLPVVYYDDSSNVIEQLSNDKGVVTY

SEQ ID NO: 122296 - protein, 27 aa, Artificial Sequence
  Cyclic GFR-binding peptide
EPLPMVYYDEYDKVVEQLSNDKGVVTY

SEQ ID NO: 122297 - protein, 27 aa, Artificial Sequence
  Cyclic GFR-binding peptide
SAISMLYLDENEKVVLKNYQDKGVVTY

SEQ ID NO: 122298 - protein, 27 aa, Artificial Sequence
  Cyclic GFR-binding peptide
SPISMLFIDENEKVVYKQYEDKGVVTY

SEQ ID NO: 122299 - protein, 27 aa, Artificial Sequence
  Cyclic GFR-binding peptide
SAISILYLVGRKPKVLKNYQDKGVVTY

SEQ ID NO: 122300 - protein, 27 aa, Artificial Sequence
  Cyclic GFR-binding peptide
NAISVLYFDDSSNVILKKYRDKGVVTY

SEQ ID NO: 122301 - protein, 27 aa, Artificial Sequence
  Cyclic GFR-binding peptide
EPLPMVYYDENEKVVEQLSNDKGVVTY

SEQ ID NO: 122302 - protein, 27 aa, Artificial Sequence
  Cyclic GFR-binding peptide
SPISMLFIDEYDKVVYKQYEDKGVVTY

SEQ ID NO: 122303 - protein, 27 aa, Artificial Sequence
  Cyclic GFR-binding peptide
SAISILYLDSANNVVLKNYQDKGVVTY

SEQ ID NO: 122304 - protein, 27 aa, Artificial Sequence
  Cyclic GFR-binding peptide
SAISILYLIGKTPKILKNYQDKGVVTY

SEQ ID NO: 122305 - protein, 27 aa, Artificial Sequence
  Cyclic GFR-binding peptide
EPLTILYYIGKTPKIEQLSNDKGVVTY

SEQ ID NO: 122306 - protein, 27 aa, Artificial Sequence
  Cyclic GFR-binding peptide
SPISILFIVGRKPKVYKQYEDKGVVTY

SEQ ID NO: 122307 - protein, 27 aa, Artificial Sequence
  Cyclic GFR-binding peptide
SAISMLYLDEYDKVVLKNYQDKGVVTY

SEQ ID NO: 122308 - protein, 27 aa, Artificial Sequence
  Cyclic GFR-binding peptide
NAISILYFDSANNVVLKKYRDKGVVTY

SEQ ID NO: 122309 - protein, 27 aa, Artificial Sequence
  Cyclic GFR-binding peptide
EPLTVLYYDDSSNVIEQLSNDKGVVTY

SEQ ID NO: 122310 - protein, 27 aa, Artificial Sequence
  Cyclic GFR-binding peptide
SAISVLYLDDSSNVILKNYQDKGVVTY

SEQ ID NO: 122311 - protein, 29 aa, Artificial Sequence
  Cyclic GFR-binding peptide
DKGVVTYVTAKKLKPKKRVYEIKRVQVPR

SEQ ID NO: 122312 - protein, 29 aa, Artificial Sequence
  Cyclic GFR-binding peptide
DKGVVTYVQVEKLKPKKRVYEVKAVKVSR

SEQ ID NO: 122313 - protein, 29 aa, Artificial Sequence
  Cyclic GFR-binding peptide
DKGVVTYVQVEKFIPKKRVIEVKAVKVSR

SEQ ID NO: 122314 - protein, 29 aa, Artificial Sequence
  Cyclic GFR-binding peptide
DKGVVTYVQVEKHQGQHPKIRVKAMKVSR

SEQ ID NO: 122315 - protein, 29 aa, Artificial Sequence
  Cyclic GFR-binding peptide
DKGVVTYVTAKKHQGQHPKIRIKRMQVPR

SEQ ID NO: 122316 - protein, 29 aa, Artificial Sequence
  Cyclic GFR-binding peptide
DKGVVTYSMEGLLKPKKRVYEMIQVTINS

SEQ ID NO: 122317 - protein, 29 aa, Artificial Sequence
  Cyclic GFR-binding peptide
DKGVVTYSMEGIFIPKKRVIEMIQVTINS

SEQ ID NO: 122318 - protein, 29 aa, Artificial Sequence
  Cyclic GFR-binding peptide
DKGVVTYSMEGLHQGQHPKIRMIQMTINS

SEQ ID NO: 122319 - protein, 29 aa, Artificial Sequence
  Cyclic GFR-binding peptide
DKGVVTYSMEGILKPKKRVYEMIQVTINS

SEQ ID NO: 122320 - protein, 29 aa, Artificial Sequence
  Cyclic GFR-binding peptide
DKGVVTYSMEGLFIPKKRVIEMIQVTINS

SEQ ID NO: 122321 - protein, 29 aa, Artificial Sequence
  Cyclic GFR-binding peptide
DKGVVTYVTAKKFIPKKRVIEIKRVQVPR

SEQ ID NO: 122322 - protein, 29 aa, Artificial Sequence
  Cyclic GFR-binding peptide
DKGVVTYSMEGIHQGQHPKIRMIQMTINS

SEQ ID NO: 122323 - protein, 29 aa, Artificial Sequence
  Cyclic GFR-binding peptide
RPVQVRKIEYVRKKPKLKKATVDKGVVTY

SEQ ID NO: 122324 - protein, 29 aa, Artificial Sequence
  Cyclic GFR-binding peptide
RSVKVAKVEYVRKKPKLKEVQVDKGVVTY

SEQ ID NO: 122325 - protein, 29 aa, Artificial Sequence
  Cyclic GFR-binding peptide
RSVKVAKVEIVRKKPIFKEVQVDKGVVTY

SEQ ID NO: 122326 - protein, 29 aa, Artificial Sequence
  Cyclic GFR-binding peptide
RSVKMAKVRIKPHQGQHKEVQVDKGVVTY

SEQ ID NO: 122327 - protein, 29 aa, Artificial Sequence
  Cyclic GFR-binding peptide
RPVQMRKIRIKPHQGQHKKATVDKGVVTY

SEQ ID NO: 122328 - protein, 29 aa, Artificial Sequence
  Cyclic GFR-binding peptide
SNITVQIMEYVRKKPKLLGEMSDKGVVTY

SEQ ID NO: 122329 - protein, 29 aa, Artificial Sequence
  Cyclic GFR-binding peptide
SNITVQIMEIVRKKPIFIGEMSDKGVVTY

SEQ ID NO: 122330 - protein, 29 aa, Artificial Sequence
  Cyclic GFR-binding peptide
SNITMQIMRIKPHQGQHLGEMSDKGVVTY

SEQ ID NO: 122331 - protein, 29 aa, Artificial Sequence
  Cyclic GFR-binding peptide
SNITVQIMEYVRKKPKLIGEMSDKGVVTY

SEQ ID NO: 122332 - protein, 29 aa, Artificial Sequence
  Cyclic GFR-binding peptide
SNITVQIMEIVRKKPIFLGEMSDKGVVTY

SEQ ID NO: 122333 - protein, 29 aa, Artificial Sequence
  Cyclic GFR-binding peptide
RPVQVRKIEIVRKKPIFKKATVDKGVVTY

SEQ ID NO: 122334 - protein, 29 aa, Artificial Sequence
  Cyclic GFR-binding peptide
SNITMQIMRIKPHQGQHIGEMSDKGVVTY

SEQ ID NO: 122335 - protein, 29 aa, Artificial Sequence
  Cyclic GFR-binding peptide
DKGVVTYVTAKKLKPKKRVYEIKRVQVPR

SEQ ID NO: 122336 - protein, 29 aa, Artificial Sequence
  Cyclic GFR-binding peptide
DKGVVTYVQVEKLKPKKRVYEVKAVKVSR

SEQ ID NO: 122337 - protein, 29 aa, Artificial Sequence
  Cyclic GFR-binding peptide
DKGVVTYVQVEKFIPKKRVIEVKAVKVSR

SEQ ID NO: 122338 - protein, 29 aa, Artificial Sequence
  Cyclic GFR-binding peptide
DKGVVTYVQVEKHQGQHPKIRVKAMKVSR

SEQ ID NO: 122339 - protein, 29 aa, Artificial Sequence
  Cyclic GFR-binding peptide
DKGVVTYVTAKKHQGQHPKIRIKRMQVPR

SEQ ID NO: 122340 - protein, 29 aa, Artificial Sequence
  Cyclic GFR-binding peptide
DKGVVTYSMEGLLKPKKRVYEMIQVTINS

SEQ ID NO: 122341 - protein, 29 aa, Artificial Sequence
  Cyclic GFR-binding peptide
DKGVVTYSMEGIFIPKKRVIEMIQVTINS

SEQ ID NO: 122342 - protein, 29 aa, Artificial Sequence
  Cyclic GFR-binding peptide
DKGVVTYSMEGLHQGQHPKIRMIQMTINS

SEQ ID NO: 122343 - protein, 29 aa, Artificial Sequence
  Cyclic GFR-binding peptide
DKGVVTYSMEGILKPKKRVYEMIQVTINS

SEQ ID NO: 122344 - protein, 29 aa, Artificial Sequence
  Cyclic GFR-binding peptide
DKGVVTYSMEGLFIPKKRVIEMIQVTINS

SEQ ID NO: 122345 - protein, 29 aa, Artificial Sequence
  Cyclic GFR-binding peptide
DKGVVTYVTAKKFIPKKRVIEIKRVQVPR

SEQ ID NO: 122346 - protein, 29 aa, Artificial Sequence
  Cyclic GFR-binding peptide
DKGVVTYSMEGIHQGQHPKIRMIQMTINS

SEQ ID NO: 122347 - protein, 29 aa, Artificial Sequence
  Cyclic GFR-binding peptide
RPVQVRKIEYVRKKPKLKKATVDKGVVTY

SEQ ID NO: 122348 - protein, 29 aa, Artificial Sequence
  Cyclic GFR-binding peptide
RSVKVAKVEYVRKKPKLKEVQVDKGVVTY

SEQ ID NO: 122349 - protein, 29 aa, Artificial Sequence
  Cyclic GFR-binding peptide
RSVKVAKVEIVRKKPIFKEVQVDKGVVTY

SEQ ID NO: 122350 - protein, 29 aa, Artificial Sequence
  Cyclic GFR-binding peptide
RSVKMAKVRIKPHQGQHKEVQVDKGVVTY

SEQ ID NO: 122351 - protein, 29 aa, Artificial Sequence
  Cyclic GFR-binding peptide
RPVQMRKIRIKPHQGQHKKATVDKGVVTY

SEQ ID NO: 122352 - protein, 29 aa, Artificial Sequence
  Cyclic GFR-binding peptide
SNITVQIMEYVRKKPKLLGEMSDKGVVTY

SEQ ID NO: 122353 - protein, 29 aa, Artificial Sequence
  Cyclic GFR-binding peptide
SNITVQIMEIVRKKPIFIGEMSDKGVVTY

SEQ ID NO: 122354 - protein, 29 aa, Artificial Sequence
  Cyclic GFR-binding peptide
SNITMQIMRIKPHQGQHLGEMSDKGVVTY

SEQ ID NO: 122355 - protein, 29 aa, Artificial Sequence
  Cyclic GFR-binding peptide
SNITVQIMEYVRKKPKLIGEMSDKGVVTY

SEQ ID NO: 122356 - protein, 29 aa, Artificial Sequence
  Cyclic GFR-binding peptide
SNITVQIMEIVRKKPIFLGEMSDKGVVTY

SEQ ID NO: 122357 - protein, 29 aa, Artificial Sequence
  Cyclic GFR-binding peptide
RPVQVRKIEIVRKKPIFKKATVDKGVVTY

SEQ ID NO: 122358 - protein, 29 aa, Artificial Sequence
  Cyclic GFR-binding peptide
SNITMQIMRIKPHQGQHIGEMSDKGVVTY

SEQ ID NO: 122359 - protein, 27 aa, Artificial Sequence
  Cyclic GFR-binding peptide
DKGVVTYEYQKYVVKENEDIYLMSIPS

SEQ ID NO: 122360 - protein, 27 aa, Artificial Sequence
  Cyclic GFR-binding peptide
DKGVVTYRYKKLIKPTKGIFYLISIAN

SEQ ID NO: 122361 - protein, 27 aa, Artificial Sequence
  Cyclic GFR-binding peptide
DKGVVTYEYKFKVKPTRGVLYLISIPE

SEQ ID NO: 122362 - protein, 27 aa, Artificial Sequence
  Cyclic GFR-binding peptide
DKGVVTYYHYKLVVKDYEDKYLMSIPS

SEQ ID NO: 122363 - protein, 27 aa, Artificial Sequence
  Cyclic GFR-binding peptide
DKGVVTYEYKFKTPVGMDDLYLVSIPE

SEQ ID NO: 122364 - protein, 27 aa, Artificial Sequence
  Cyclic GFR-binding peptide
DKGVVTYEYQKYVKPKRGVIYLISIPS

SEQ ID NO: 122365 - protein, 27 aa, Artificial Sequence
  Cyclic GFR-binding peptide
DKGVVTYRYKKLVVKDYEDFYLMSIAN

SEQ ID NO: 122366 - protein, 27 aa, Artificial Sequence
  Cyclic GFR-binding peptide
DKGVVTYEYQKYVVKDYEDIYLMSIPS

SEQ ID NO: 122367 - protein, 27 aa, Artificial Sequence
  Cyclic GFR-binding peptide
DKGVVTYRYKKLVKPTRGVFYLISIAN

SEQ ID NO: 122368 - protein, 27 aa, Artificial Sequence
  Cyclic GFR-binding peptide
DKGVVTYYHYKLIKPTKGIKYLISIPS

SEQ ID NO: 122369 - protein, 27 aa, Artificial Sequence
  Cyclic GFR-binding peptide
DKGVVTYYHYKLVVKENEDKYLMSIPS

SEQ ID NO: 122370 - protein, 27 aa, Artificial Sequence
  Cyclic GFR-binding peptide
DKGVVTYYHYKLVKPKRGVKYLISIPS

SEQ ID NO: 122371 - protein, 27 aa, Artificial Sequence
  Cyclic GFR-binding peptide
DKGVVTYEYKFKIKPTKGILYLISIPE

SEQ ID NO: 122372 - protein, 27 aa, Artificial Sequence
  Cyclic GFR-binding peptide
DKGVVTYEYQKYIKPTKGIIYLISIPS

SEQ ID NO: 122373 - protein, 27 aa, Artificial Sequence
  Cyclic GFR-binding peptide
DKGVVTYRYKKLVVKENEDFYLMSIAN

SEQ ID NO: 122374 - protein, 27 aa, Artificial Sequence
  Cyclic GFR-binding peptide
DKGVVTYRYKKLVVNNAADFYLISIAN

SEQ ID NO: 122375 - protein, 27 aa, Artificial Sequence
  Cyclic GFR-binding peptide
DKGVVTYYHYKLYTVVGKDKYLISIPS

SEQ ID NO: 122376 - protein, 27 aa, Artificial Sequence
  Cyclic GFR-binding peptide
DKGVVTYRYKKLTPVGMDDFYLVSIAN

SEQ ID NO: 122377 - protein, 27 aa, Artificial Sequence
  Cyclic GFR-binding peptide
DKGVVTYRYKKLVKPKRGVFYLISIAN

SEQ ID NO: 122378 - protein, 27 aa, Artificial Sequence
  Cyclic GFR-binding peptide
DKGVVTYYHYKLVVNNAADKYLISIPS

SEQ ID NO: 122379 - protein, 27 aa, Artificial Sequence
  Cyclic GFR-binding peptide
DKGVVTYYHYKLIVNSSDDKYLVSIPS

SEQ ID NO: 122380 - protein, 27 aa, Artificial Sequence
  Cyclic GFR-binding peptide
DKGVVTYRYKKLIVNNSSDFYLVSIAN

SEQ ID NO: 122381 - protein, 27 aa, Artificial Sequence
  Cyclic GFR-binding peptide
DKGVVTYRYKKLYTVVGKDFYLISIAN

SEQ ID NO: 122382 - protein, 27 aa, Artificial Sequence
  Cyclic GFR-binding peptide
DKGVVTYEYQKYVVNNAADIYLISIPS

SEQ ID NO: 122383 - protein, 27 aa, Artificial Sequence
  Cyclic GFR-binding peptide
DKGVVTYRYKKLIVNSSDDFYLVSIAN

SEQ ID NO: 122384 - protein, 27 aa, Artificial Sequence
  Cyclic GFR-binding peptide
DKGVVTYEYKFKIVNNSSDLYLVSIPE

SEQ ID NO: 122385 - protein, 27 aa, Artificial Sequence
  Cyclic GFR-binding peptide
DKGVVTYEYQKYVKPTRGVIYLISIPS

SEQ ID NO: 122386 - protein, 27 aa, Artificial Sequence
  Cyclic GFR-binding peptide
DKGVVTYEYQKYIVNSSDDIYLVSIPS

SEQ ID NO: 122387 - protein, 27 aa, Artificial Sequence
  Cyclic GFR-binding peptide
DKGVVTYYHYKLTPVGMDDKYLVSIPS

SEQ ID NO: 122388 - protein, 27 aa, Artificial Sequence
  Cyclic GFR-binding peptide
DKGVVTYYHYKLIVNNSSDKYLVSIPS

SEQ ID NO: 122389 - protein, 27 aa, Artificial Sequence
  Cyclic GFR-binding peptide
DKGVVTYEYKFKIVNSSDDLYLVSIPE

SEQ ID NO: 122390 - protein, 27 aa, Artificial Sequence
  Cyclic GFR-binding peptide
DKGVVTYYHYKLVKPTRGVKYLISIPS

SEQ ID NO: 122391 - protein, 27 aa, Artificial Sequence
  Cyclic GFR-binding peptide
DKGVVTYEYKFKVKPKRGVLYLISIPE

SEQ ID NO: 122392 - protein, 27 aa, Artificial Sequence
  Cyclic GFR-binding peptide
DKGVVTYEYQKYYTVVGKDIYLISIPS

SEQ ID NO: 122393 - protein, 27 aa, Artificial Sequence
  Cyclic GFR-binding peptide
DKGVVTYEYKFKVVKENEDLYLMSIPE

SEQ ID NO: 122394 - protein, 27 aa, Artificial Sequence
  Cyclic GFR-binding peptide
DKGVVTYEYQKYTPVGMDDIYLVSIPS

SEQ ID NO: 122395 - protein, 27 aa, Artificial Sequence
  Cyclic GFR-binding peptide
DKGVVTYEYQKYIVNNSSDIYLVSIPS

SEQ ID NO: 122396 - protein, 27 aa, Artificial Sequence
  Cyclic GFR-binding peptide
DKGVVTYEYKFKVVKDYEDLYLMSIPE

SEQ ID NO: 122397 - protein, 27 aa, Artificial Sequence
  Cyclic GFR-binding peptide
DKGVVTYEYKFKYTVVGKDLYLISIPE

SEQ ID NO: 122398 - protein, 27 aa, Artificial Sequence
  Cyclic GFR-binding peptide
DKGVVTYEYKFKVVNNAADLYLISIPE

SEQ ID NO: 122399 - protein, 27 aa, Artificial Sequence
  Cyclic GFR-binding peptide
SPISMLYIDENEKVVYKQYEDKGVVTY

SEQ ID NO: 122400 - protein, 27 aa, Artificial Sequence
  Cyclic GFR-binding peptide
NAISILYFIGKTPKILKKYRDKGVVTY

SEQ ID NO: 122401 - protein, 27 aa, Artificial Sequence
  Cyclic GFR-binding peptide
EPISILYLVGRTPKVKFKYEDKGVVTY

SEQ ID NO: 122402 - protein, 27 aa, Artificial Sequence
  Cyclic GFR-binding peptide
SPISMLYKDEYDKVVLKYHYDKGVVTY

SEQ ID NO: 122403 - protein, 27 aa, Artificial Sequence
  Cyclic GFR-binding peptide
EPISVLYLDDMGVPTKFKYEDKGVVTY

SEQ ID NO: 122404 - protein, 27 aa, Artificial Sequence
  Cyclic GFR-binding peptide
SPISILYIVGRKPKVYKQYEDKGVVTY

SEQ ID NO: 122405 - protein, 27 aa, Artificial Sequence
  Cyclic GFR-binding peptide
NAISMLYFDEYDKVVLKKYRDKGVVTY

SEQ ID NO: 122406 - protein, 27 aa, Artificial Sequence
  Cyclic GFR-binding peptide
SPISMLYIDEYDKVVYKQYEDKGVVTY

SEQ ID NO: 122407 - protein, 27 aa, Artificial Sequence
  Cyclic GFR-binding peptide
NAISILYFVGRTPKVLKKYRDKGVVTY

SEQ ID NO: 122408 - protein, 27 aa, Artificial Sequence
  Cyclic GFR-binding peptide
SPISILYKIGKTPKILKYHYDKGVVTY

SEQ ID NO: 122409 - protein, 27 aa, Artificial Sequence
  Cyclic GFR-binding peptide
SPISMLYKDENEKVVLKYHYDKGVVTY

SEQ ID NO: 122410 - protein, 27 aa, Artificial Sequence
  Cyclic GFR-binding peptide
SPISILYKVGRKPKVLKYHYDKGVVTY

SEQ ID NO: 122411 - protein, 27 aa, Artificial Sequence
  Cyclic GFR-binding peptide
EPISILYLIGKTPKIKFKYEDKGVVTY

SEQ ID NO: 122412 - protein, 27 aa, Artificial Sequence
  Cyclic GFR-binding peptide
SPISILYIIGKTPKIYKQYEDKGVVTY

SEQ ID NO: 122413 - protein, 27 aa, Artificial Sequence
  Cyclic GFR-binding peptide
NAISMLYFDENEKVVLKKYRDKGVVTY

SEQ ID NO: 122414 - protein, 27 aa, Artificial Sequence
  Cyclic GFR-binding peptide
NAISILYFDAANNVVLKKYRDKGVVTY

SEQ ID NO: 122415 - protein, 27 aa, Artificial Sequence
  Cyclic GFR-binding peptide
SPISILYKDKGVVTYLKYHYDKGVVTY

SEQ ID NO: 122416 - protein, 27 aa, Artificial Sequence
  Cyclic GFR-binding peptide
NAISVLYFDDMGVPTLKKYRDKGVVTY

SEQ ID NO: 122417 - protein, 27 aa, Artificial Sequence
  Cyclic GFR-binding peptide
NAISILYFVGRKPKVLKKYRDKGVVTY

SEQ ID NO: 122418 - protein, 27 aa, Artificial Sequence
  Cyclic GFR-binding peptide
SPISILYKDAANNVVLKYHYDKGVVTY

SEQ ID NO: 122419 - protein, 27 aa, Artificial Sequence
  Cyclic GFR-binding peptide
SPISVLYKDDSSNVILKYHYDKGVVTY

SEQ ID NO: 122420 - protein, 27 aa, Artificial Sequence
  Cyclic GFR-binding peptide
NAISVLYFDSSNNVILKKYRDKGVVTY

SEQ ID NO: 122421 - protein, 27 aa, Artificial Sequence
  Cyclic GFR-binding peptide
NAISILYFDKGVVTYLKKYRDKGVVTY

SEQ ID NO: 122422 - protein, 27 aa, Artificial Sequence
  Cyclic GFR-binding peptide
SPISILYIDAANNVVYKQYEDKGVVTY

SEQ ID NO: 122423 - protein, 27 aa, Artificial Sequence
  Cyclic GFR-binding peptide
NAISVLYFDDSSNVILKKYRDKGVVTY

SEQ ID NO: 122424 - protein, 27 aa, Artificial Sequence
  Cyclic GFR-binding peptide
EPISVLYLDSSNNVIKFKYEDKGVVTY

SEQ ID NO: 122425 - protein, 27 aa, Artificial Sequence
  Cyclic GFR-binding peptide
SPISILYIVGRTPKVYKQYEDKGVVTY

SEQ ID NO: 122426 - protein, 27 aa, Artificial Sequence
  Cyclic GFR-binding peptide
SPISVLYIDDSSNVIYKQYEDKGVVTY

SEQ ID NO: 122427 - protein, 27 aa, Artificial Sequence
  Cyclic GFR-binding peptide
SPISVLYKDDMGVPTLKYHYDKGVVTY

SEQ ID NO: 122428 - protein, 27 aa, Artificial Sequence
  Cyclic GFR-binding peptide
SPISVLYKDSSNNVILKYHYDKGVVTY

SEQ ID NO: 122429 - protein, 27 aa, Artificial Sequence
  Cyclic GFR-binding peptide
EPISVLYLDDSSNVIKFKYEDKGVVTY

SEQ ID NO: 122430 - protein, 27 aa, Artificial Sequence
  Cyclic GFR-binding peptide
SPISILYKVGRTPKVLKYHYDKGVVTY

SEQ ID NO: 122431 - protein, 27 aa, Artificial Sequence
  Cyclic GFR-binding peptide
EPISILYLVGRKPKVKFKYEDKGVVTY

SEQ ID NO: 122432 - protein, 27 aa, Artificial Sequence
  Cyclic GFR-binding peptide
SPISILYIDKGVVTYYKQYEDKGVVTY

SEQ ID NO: 122433 - protein, 27 aa, Artificial Sequence
  Cyclic GFR-binding peptide
EPISMLYLDENEKVVKFKYEDKGVVTY

SEQ ID NO: 122434 - protein, 27 aa, Artificial Sequence
  Cyclic GFR-binding peptide
SPISVLYIDDMGVPTYKQYEDKGVVTY

SEQ ID NO: 122435 - protein, 27 aa, Artificial Sequence
  Cyclic GFR-binding peptide
SPISVLYIDSSNNVIYKQYEDKGVVTY

SEQ ID NO: 122436 - protein, 27 aa, Artificial Sequence
  Cyclic GFR-binding peptide
EPISMLYLDEYDKVVKFKYEDKGVVTY

SEQ ID NO: 122437 - protein, 27 aa, Artificial Sequence
  Cyclic GFR-binding peptide
EPISILYLDKGVVTYKFKYEDKGVVTY

SEQ ID NO: 122438 - protein, 27 aa, Artificial Sequence
  Cyclic GFR-binding peptide
EPISILYLDAANNVVKFKYEDKGVVTY

SEQ ID NO: 122439 - protein, 27 aa, Artificial Sequence
  Cyclic GFR-binding peptide
DKGVVTYPIKGYIIQQKDNFYLMNIPS

SEQ ID NO: 122440 - protein, 27 aa, Artificial Sequence
  Cyclic GFR-binding peptide
DKGVVTYPIKGYVVKDYEDFYLMNIPS

SEQ ID NO: 122441 - protein, 27 aa, Artificial Sequence
  Cyclic GFR-binding peptide
DKGVVTYPIKGYIVNSSDDFYLVNIPS

SEQ ID NO: 122442 - protein, 27 aa, Artificial Sequence
  Cyclic GFR-binding peptide
DKGVVTYPIKGYLLVRGNDFYLMNIPS

SEQ ID NO: 122443 - protein, 27 aa, Artificial Sequence
  Cyclic GFR-binding peptide
DKGVVTYPIKGYVVNNAADFYLINIPS

SEQ ID NO: 122444 - protein, 27 aa, Artificial Sequence
  Cyclic GFR-binding peptide
DKGVVTYPIKGYVVKENEDFYLMNIPS

SEQ ID NO: 122445 - protein, 27 aa, Artificial Sequence
  Cyclic GFR-binding peptide
DKGVVTYPIKGYVVNNASDFYLINIPS

SEQ ID NO: 122446 - protein, 27 aa, Artificial Sequence
  Cyclic GFR-binding peptide
DKGVVTYPIKGYYTVVGKDFYLINIPS

SEQ ID NO: 122447 - protein, 27 aa, Artificial Sequence
  Cyclic GFR-binding peptide
DKGVVTYPIKGYTPVGMDDFYLVNIPS

SEQ ID NO: 122448 - protein, 27 aa, Artificial Sequence
  Cyclic GFR-binding peptide
DKGVVTYPIKGYIVNNSSDFYLVNIPS

SEQ ID NO: 122449 - protein, 27 aa, Artificial Sequence
  Cyclic GFR-binding peptide
SPINMLYFNDKQQIIYGKIPDKGVVTY

SEQ ID NO: 122450 - protein, 27 aa, Artificial Sequence
  Cyclic GFR-binding peptide
SPINMLYFDEYDKVVYGKIPDKGVVTY

SEQ ID NO: 122451 - protein, 27 aa, Artificial Sequence
  Cyclic GFR-binding peptide
SPINVLYFDDSSNVIYGKIPDKGVVTY

SEQ ID NO: 122452 - protein, 27 aa, Artificial Sequence
  Cyclic GFR-binding peptide
SPINMLYFDNGRVLLYGKIPDKGVVTY

SEQ ID NO: 122453 - protein, 27 aa, Artificial Sequence
  Cyclic GFR-binding peptide
SPINILYFDAANNVVYGKIPDKGVVTY

SEQ ID NO: 122454 - protein, 27 aa, Artificial Sequence
  Cyclic GFR-binding peptide
SPINMLYFDENEKVVYGKIPDKGVVTY

SEQ ID NO: 122455 - protein, 27 aa, Artificial Sequence
  Cyclic GFR-binding peptide
SPINILYFDSANNVVYGKIPDKGVVTY

SEQ ID NO: 122456 - protein, 27 aa, Artificial Sequence
  Cyclic GFR-binding peptide
SPINILYFDKGVVTYYGKIPDKGVVTY

SEQ ID NO: 122457 - protein, 27 aa, Artificial Sequence
  Cyclic GFR-binding peptide
SPINVLYFDDMGVPTYGKIPDKGVVTY

SEQ ID NO: 122458 - protein, 27 aa, Artificial Sequence
  Cyclic GFR-binding peptide
SPINVLYFDSSNNVIYGKIPDKGVVTY

SEQ ID NO: 122459 - protein, 27 aa, Artificial Sequence
  Cyclic GFR-binding peptide
DKGVVTYPIKGYIIQQKDNFYLMNIPS

SEQ ID NO: 122460 - protein, 27 aa, Artificial Sequence
  Cyclic GFR-binding peptide
DKGVVTYPIKGYVVKDYEDFYLMNIPS

SEQ ID NO: 122461 - protein, 27 aa, Artificial Sequence
  Cyclic GFR-binding peptide
DKGVVTYPIKGYIVNSSDDFYLVNIPS

SEQ ID NO: 122462 - protein, 27 aa, Artificial Sequence
  Cyclic GFR-binding peptide
DKGVVTYPIKGYLLVRGNDFYLMNIPS

SEQ ID NO: 122463 - protein, 27 aa, Artificial Sequence
  Cyclic GFR-binding peptide
DKGVVTYPIKGYVVNNAADFYLINIPS

SEQ ID NO: 122464 - protein, 27 aa, Artificial Sequence
  Cyclic GFR-binding peptide
DKGVVTYPIKGYVVKENEDFYLMNIPS

SEQ ID NO: 122465 - protein, 27 aa, Artificial Sequence
  Cyclic GFR-binding peptide
DKGVVTYPIKGYVVNNASDFYLINIPS

SEQ ID NO: 122466 - protein, 27 aa, Artificial Sequence
  Cyclic GFR-binding peptide
DKGVVTYPIKGYYTVVGKDFYLINIPS

SEQ ID NO: 122467 - protein, 27 aa, Artificial Sequence
  Cyclic GFR-binding peptide
DKGVVTYPIKGYTPVGMDDFYLVNIPS

SEQ ID NO: 122468 - protein, 27 aa, Artificial Sequence
  Cyclic GFR-binding peptide
DKGVVTYPIKGYIVNNSSDFYLVNIPS

SEQ ID NO: 122469 - protein, 27 aa, Artificial Sequence
  Cyclic GFR-binding peptide
SPINMLYFNDKQQIIYGKIPDKGVVTY

SEQ ID NO: 122470 - protein, 27 aa, Artificial Sequence
  Cyclic GFR-binding peptide
SPINMLYFDEYDKVVYGKIPDKGVVTY

SEQ ID NO: 122471 - protein, 27 aa, Artificial Sequence
  Cyclic GFR-binding peptide
SPINVLYFDDSSNVIYGKIPDKGVVTY

SEQ ID NO: 122472 - protein, 27 aa, Artificial Sequence
  Cyclic GFR-binding peptide
SPINMLYFDNGRVLLYGKIPDKGVVTY

SEQ ID NO: 122473 - protein, 27 aa, Artificial Sequence
  Cyclic GFR-binding peptide
SPINILYFDAANNVVYGKIPDKGVVTY

SEQ ID NO: 122474 - protein, 27 aa, Artificial Sequence
  Cyclic GFR-binding peptide
SPINMLYFDENEKVVYGKIPDKGVVTY

SEQ ID NO: 122475 - protein, 27 aa, Artificial Sequence
  Cyclic GFR-binding peptide
SPINILYFDSANNVVYGKIPDKGVVTY

SEQ ID NO: 122476 - protein, 27 aa, Artificial Sequence
  Cyclic GFR-binding peptide
SPINILYFDKGVVTYYGKIPDKGVVTY

SEQ ID NO: 122477 - protein, 27 aa, Artificial Sequence
  Cyclic GFR-binding peptide
SPINVLYFDDMGVPTYGKIPDKGVVTY

SEQ ID NO: 122478 - protein, 27 aa, Artificial Sequence
  Cyclic GFR-binding peptide
SPINVLYFDSSNNVIYGKIPDKGVVTY

SEQ ID NO: 122479 - protein, 27 aa, Artificial Sequence
  Cyclic GFR-binding peptide
DKGVVTYRYKKLIKPTKGIFYLISIAN

SEQ ID NO: 122480 - protein, 27 aa, Artificial Sequence
  Cyclic GFR-binding peptide
DKGVVTYRYKKLVVKDYEDFYLMSIAN

SEQ ID NO: 122481 - protein, 27 aa, Artificial Sequence
  Cyclic GFR-binding peptide
DKGVVTYRYKKLVKPTRGVFYLISIAN

SEQ ID NO: 122482 - protein, 27 aa, Artificial Sequence
  Cyclic GFR-binding peptide
DKGVVTYRYKKLVVKENEDFYLMSIAN

SEQ ID NO: 122483 - protein, 27 aa, Artificial Sequence
  Cyclic GFR-binding peptide
DKGVVTYRYKKLVKPKRGVFYLISIAN

SEQ ID NO: 122484 - protein, 27 aa, Artificial Sequence
  Cyclic GFR-binding peptide
DKGVVTYRYKKLIVNSSDDFYLVSIAN

SEQ ID NO: 122485 - protein, 27 aa, Artificial Sequence
  Cyclic GFR-binding peptide
DKGVVTYRYKKLVVNNASDFYLISIAN

SEQ ID NO: 122486 - protein, 27 aa, Artificial Sequence
  Cyclic GFR-binding peptide
NAISILYFIGKTPKILKKYRDKGVVTY

SEQ ID NO: 122487 - protein, 27 aa, Artificial Sequence
  Cyclic GFR-binding peptide
NAISMLYFDEYDKVVLKKYRDKGVVTY

SEQ ID NO: 122488 - protein, 27 aa, Artificial Sequence
  Cyclic GFR-binding peptide
NAISILYFVGRTPKVLKKYRDKGVVTY

SEQ ID NO: 122489 - protein, 27 aa, Artificial Sequence
  Cyclic GFR-binding peptide
NAISMLYFDENEKVVLKKYRDKGVVTY

SEQ ID NO: 122490 - protein, 27 aa, Artificial Sequence
  Cyclic GFR-binding peptide
NAISILYFVGRKPKVLKKYRDKGVVTY

SEQ ID NO: 122491 - protein, 27 aa, Artificial Sequence
  Cyclic GFR-binding peptide
NAISVLYFDDSSNVILKKYRDKGVVTY

SEQ ID NO: 122492 - protein, 27 aa, Artificial Sequence
  Cyclic GFR-binding peptide
NAISILYFDSANNVVLKKYRDKGVVTY

SEQ ID NO: 122493 - protein, 27 aa, Artificial Sequence
  Cyclic GFR-binding peptide
DKGVVTYEYQKYVVKENEDIYLMSIPS

SEQ ID NO: 122494 - protein, 27 aa, Artificial Sequence
  Cyclic GFR-binding peptide
DKGVVTYNSLQEVVKDYEDYYLMTLPE

SEQ ID NO: 122495 - protein, 27 aa, Artificial Sequence
  Cyclic GFR-binding peptide
DKGVVTYEYQKYVVKENEDIFLMSIPS

SEQ ID NO: 122496 - protein, 27 aa, Artificial Sequence
  Cyclic GFR-binding peptide
DKGVVTYNSLQEIKPTKGIYYVIPLPE

SEQ ID NO: 122497 - protein, 27 aa, Artificial Sequence
  Cyclic GFR-binding peptide
DKGVVTYNSLQEVKPKRGVYYLITLPE

SEQ ID NO: 122498 - protein, 27 aa, Artificial Sequence
  Cyclic GFR-binding peptide
DKGVVTYEYQKYVVNNAADIYLISIPS

SEQ ID NO: 122499 - protein, 27 aa, Artificial Sequence
  Cyclic GFR-binding peptide
DKGVVTYNSLQEVKPTRGVYYVIPLPE

SEQ ID NO: 122500 - protein, 27 aa, Artificial Sequence
  Cyclic GFR-binding peptide
DKGVVTYEYQKYIVNSSDDIFLVSIPS

SEQ ID NO: 122501 - protein, 27 aa, Artificial Sequence
  Cyclic GFR-binding peptide
DKGVVTYEYQKYVKPTRGVIFLISIPS

SEQ ID NO: 122502 - protein, 27 aa, Artificial Sequence
  Cyclic GFR-binding peptide
DKGVVTYEYQKYVVKDYEDIYLMSIPS

SEQ ID NO: 122503 - protein, 27 aa, Artificial Sequence
  Cyclic GFR-binding peptide
DKGVVTYNSLQEVVKENEDYYLMTLPE

SEQ ID NO: 122504 - protein, 27 aa, Artificial Sequence
  Cyclic GFR-binding peptide
DKGVVTYNSLQEVVNNASDYYLITLPE

SEQ ID NO: 122505 - protein, 27 aa, Artificial Sequence
  Cyclic GFR-binding peptide
DKGVVTYNSLQEVKPKRGVYYVIPLPE

SEQ ID NO: 122506 - protein, 27 aa, Artificial Sequence
  Cyclic GFR-binding peptide
DKGVVTYEYQKYIVNSSDDIYLVSIPS

SEQ ID NO: 122507 - protein, 27 aa, Artificial Sequence
  Cyclic GFR-binding peptide
DKGVVTYNSLQEVVKENEDYYVMPLPE

SEQ ID NO: 122508 - protein, 27 aa, Artificial Sequence
  Cyclic GFR-binding peptide
DKGVVTYEYQKYVVKDYEDIFLMSIPS

SEQ ID NO: 122509 - protein, 27 aa, Artificial Sequence
  Cyclic GFR-binding peptide
DKGVVTYNSLQEVVNNASDYYVIPLPE

SEQ ID NO: 122510 - protein, 27 aa, Artificial Sequence
  Cyclic GFR-binding peptide
DKGVVTYEYQKYVVNNASDIYLISIPS

SEQ ID NO: 122511 - protein, 27 aa, Artificial Sequence
  Cyclic GFR-binding peptide
DKGVVTYNSLQEVKPTRGVYYLITLPE

SEQ ID NO: 122512 - protein, 27 aa, Artificial Sequence
  Cyclic GFR-binding peptide
DKGVVTYEYQKYYTVVGKDIYLISIPS

SEQ ID NO: 122513 - protein, 27 aa, Artificial Sequence
  Cyclic GFR-binding peptide
DKGVVTYEYQKYIIQQKDNIYLMSIPS

SEQ ID NO: 122514 - protein, 27 aa, Artificial Sequence
  Cyclic GFR-binding peptide
DKGVVTYEYQKYTPVGMDDIYLVSIPS

SEQ ID NO: 122515 - protein, 27 aa, Artificial Sequence
  Cyclic GFR-binding peptide
DKGVVTYEYQKYIKPTKGIIFLISIPS

SEQ ID NO: 122516 - protein, 27 aa, Artificial Sequence
  Cyclic GFR-binding peptide
DKGVVTYEYQKYIVNNSSDIYLVSIPS

SEQ ID NO: 122517 - protein, 27 aa, Artificial Sequence
  Cyclic GFR-binding peptide
DKGVVTYNSLQEIKPTKGIYYLITLPE

SEQ ID NO: 122518 - protein, 27 aa, Artificial Sequence
  Cyclic GFR-binding peptide
DKGVVTYEYQKYVVNNASDIFLISIPS

SEQ ID NO: 122519 - protein, 27 aa, Artificial Sequence
  Cyclic GFR-binding peptide
DKGVVTYEYQKYVKPKRGVIFLISIPS

SEQ ID NO: 122520 - protein, 27 aa, Artificial Sequence
  Cyclic GFR-binding peptide
DKGVVTYNSLQEIVNSSDDYYVVPLPE

SEQ ID NO: 122521 - protein, 27 aa, Artificial Sequence
  Cyclic GFR-binding peptide
DKGVVTYNSLQEVVKDYEDYYVMPLPE

SEQ ID NO: 122522 - protein, 27 aa, Artificial Sequence
  Cyclic GFR-binding peptide
DKGVVTYEYQKYLLVRGNDIYLMSIPS

SEQ ID NO: 122523 - protein, 27 aa, Artificial Sequence
  Cyclic GFR-binding peptide
DKGVVTYNSLQEIVNSSDDYYLVTLPE

SEQ ID NO: 122524 - protein, 27 aa, Artificial Sequence
  Cyclic GFR-binding peptide
SPISMLYIDENEKVVYKQYEDKGVVTY

SEQ ID NO: 122525 - protein, 27 aa, Artificial Sequence
  Cyclic GFR-binding peptide
EPLTMLYYDEYDKVVEQLSNDKGVVTY

SEQ ID NO: 122526 - protein, 27 aa, Artificial Sequence
  Cyclic GFR-binding peptide
SPISMLFIDENEKVVYKQYEDKGVVTY

SEQ ID NO: 122527 - protein, 27 aa, Artificial Sequence
  Cyclic GFR-binding peptide
EPLPIVYYIGKTPKIEQLSNDKGVVTY

SEQ ID NO: 122528 - protein, 27 aa, Artificial Sequence
  Cyclic GFR-binding peptide
EPLTILYYVGRKPKVEQLSNDKGVVTY

SEQ ID NO: 122529 - protein, 27 aa, Artificial Sequence
  Cyclic GFR-binding peptide
SPISILYIDAANNVVYKQYEDKGVVTY

SEQ ID NO: 122530 - protein, 27 aa, Artificial Sequence
  Cyclic GFR-binding peptide
EPLPIVYYVGRTPKVEQLSNDKGVVTY

SEQ ID NO: 122531 - protein, 27 aa, Artificial Sequence
  Cyclic GFR-binding peptide
SPISVLFIDDSSNVIYKQYEDKGVVTY

SEQ ID NO: 122532 - protein, 27 aa, Artificial Sequence
  Cyclic GFR-binding peptide
SPISILFIVGRTPKVYKQYEDKGVVTY

SEQ ID NO: 122533 - protein, 27 aa, Artificial Sequence
  Cyclic GFR-binding peptide
SPISMLYIDEYDKVVYKQYEDKGVVTY

SEQ ID NO: 122534 - protein, 27 aa, Artificial Sequence
  Cyclic GFR-binding peptide
EPLTMLYYDENEKVVEQLSNDKGVVTY

SEQ ID NO: 122535 - protein, 27 aa, Artificial Sequence
  Cyclic GFR-binding peptide
EPLTILYYDSANNVVEQLSNDKGVVTY

SEQ ID NO: 122536 - protein, 27 aa, Artificial Sequence
  Cyclic GFR-binding peptide
EPLPIVYYVGRKPKVEQLSNDKGVVTY

SEQ ID NO: 122537 - protein, 27 aa, Artificial Sequence
  Cyclic GFR-binding peptide
SPISVLYIDDSSNVIYKQYEDKGVVTY

SEQ ID NO: 122538 - protein, 27 aa, Artificial Sequence
  Cyclic GFR-binding peptide
EPLPMVYYDENEKVVEQLSNDKGVVTY

SEQ ID NO: 122539 - protein, 27 aa, Artificial Sequence
  Cyclic GFR-binding peptide
SPISMLFIDEYDKVVYKQYEDKGVVTY

SEQ ID NO: 122540 - protein, 27 aa, Artificial Sequence
  Cyclic GFR-binding peptide
EPLPIVYYDSANNVVEQLSNDKGVVTY

SEQ ID NO: 122541 - protein, 27 aa, Artificial Sequence
  Cyclic GFR-binding peptide
SPISILYIDSANNVVYKQYEDKGVVTY

SEQ ID NO: 122542 - protein, 27 aa, Artificial Sequence
  Cyclic GFR-binding peptide
EPLTILYYVGRTPKVEQLSNDKGVVTY

SEQ ID NO: 122543 - protein, 27 aa, Artificial Sequence
  Cyclic GFR-binding peptide
SPISILYIDKGVVTYYKQYEDKGVVTY

SEQ ID NO: 122544 - protein, 27 aa, Artificial Sequence
  Cyclic GFR-binding peptide
SPISMLYINDKQQIIYKQYEDKGVVTY

SEQ ID NO: 122545 - protein, 27 aa, Artificial Sequence
  Cyclic GFR-binding peptide
SPISVLYIDDMGVPTYKQYEDKGVVTY

SEQ ID NO: 122546 - protein, 27 aa, Artificial Sequence
  Cyclic GFR-binding peptide
SPISILFIIGKTPKIYKQYEDKGVVTY

SEQ ID NO: 122547 - protein, 27 aa, Artificial Sequence
  Cyclic GFR-binding peptide
SPISVLYIDSSNNVIYKQYEDKGVVTY

SEQ ID NO: 122548 - protein, 27 aa, Artificial Sequence
  Cyclic GFR-binding peptide
EPLTILYYIGKTPKIEQLSNDKGVVTY

SEQ ID NO: 122549 - protein, 27 aa, Artificial Sequence
  Cyclic GFR-binding peptide
SPISILFIDSANNVVYKQYEDKGVVTY

SEQ ID NO: 122550 - protein, 27 aa, Artificial Sequence
  Cyclic GFR-binding peptide
SPISILFIVGRKPKVYKQYEDKGVVTY

SEQ ID NO: 122551 - protein, 27 aa, Artificial Sequence
  Cyclic GFR-binding peptide
EPLPVVYYDDSSNVIEQLSNDKGVVTY

SEQ ID NO: 122552 - protein, 27 aa, Artificial Sequence
  Cyclic GFR-binding peptide
EPLPMVYYDEYDKVVEQLSNDKGVVTY

SEQ ID NO: 122553 - protein, 27 aa, Artificial Sequence
  Cyclic GFR-binding peptide
SPISMLYIDNGRVLLYKQYEDKGVVTY

SEQ ID NO: 122554 - protein, 27 aa, Artificial Sequence
  Cyclic GFR-binding peptide
EPLTVLYYDDSSNVIEQLSNDKGVVTY

SEQ ID NO: 122555 - protein, 27 aa, Artificial Sequence
  Cyclic GFR-binding peptide
DKGVVTYPYVKLVVKENEDFFLMSLSS

SEQ ID NO: 122556 - protein, 29 aa, Artificial Sequence
  Cyclic GFR-binding peptide
DKGVVTYPYVKLHQGQHPKIRFFLMSLSS

SEQ ID NO: 122557 - protein, 27 aa, Artificial Sequence
  Cyclic GFR-binding peptide
DKGVVTYPYVKLVVNKNEDFFLISLSS

SEQ ID NO: 122558 - protein, 27 aa, Artificial Sequence
  Cyclic GFR-binding peptide
DKGVVTYPYVKLVKPKRGVLFFISLSS

SEQ ID NO: 122559 - protein, 27 aa, Artificial Sequence
  Cyclic GFR-binding peptide
DKGVVTYPYVKLVVNNAADFFLISLSS

SEQ ID NO: 122560 - protein, 27 aa, Artificial Sequence
  Cyclic GFR-binding peptide
DKGVVTYPYVKLIVNNSSDFFLVSLSS

SEQ ID NO: 122561 - protein, 27 aa, Artificial Sequence
  Cyclic GFR-binding peptide
DKGVVTYPYVKLIIQQKDNFFLMSLSS

SEQ ID NO: 122562 - protein, 27 aa, Artificial Sequence
  Cyclic GFR-binding peptide
DKGVVTYPYVKLLLVRGNDFFLMSLSS

SEQ ID NO: 122563 - protein, 27 aa, Artificial Sequence
  Cyclic GFR-binding peptide
DKGVVTYPYVKLVKPTRGVLFFISLSS

SEQ ID NO: 122564 - protein, 27 aa, Artificial Sequence
  Cyclic GFR-binding peptide
DKGVVTYPYVKLVVNNASDFFLISLSS

SEQ ID NO: 122565 - protein, 27 aa, Artificial Sequence
  Cyclic GFR-binding peptide
DKGVVTYPYVKLIKPTKGILFFISLSS

SEQ ID NO: 122566 - protein, 27 aa, Artificial Sequence
  Cyclic GFR-binding peptide
DKGVVTYPYVKLTPVGMDDFFLVSLSS

SEQ ID NO: 122567 - protein, 27 aa, Artificial Sequence
  Cyclic GFR-binding peptide
DKGVVTYPYVKLYTVVGKDFFLISLSS

SEQ ID NO: 122568 - protein, 27 aa, Artificial Sequence
  Cyclic GFR-binding peptide
DKGVVTYPYVKLVVKDYEDFFLMSLSS

SEQ ID NO: 122569 - protein, 27 aa, Artificial Sequence
  Cyclic GFR-binding peptide
DKGVVTYPYVKLIVNSSDDFFLVSLSS

SEQ ID NO: 122570 - protein, 29 aa, Artificial Sequence
  Cyclic GFR-binding peptide
DKGVVTYPYVKLLKPKKRVYEFFLVSLSS

SEQ ID NO: 122571 - protein, 27 aa, Artificial Sequence
  Cyclic GFR-binding peptide
SSLSMLFFDENEKVVLKVYPDKGVVTY

SEQ ID NO: 122572 - protein, 29 aa, Artificial Sequence
  Cyclic GFR-binding peptide
SSLSMLFFRIKPHQGQHLKVYPDKGVVTY

SEQ ID NO: 122573 - protein, 27 aa, Artificial Sequence
  Cyclic GFR-binding peptide
SSLSILFFDENKNVVLKVYPDKGVVTY

SEQ ID NO: 122574 - protein, 27 aa, Artificial Sequence
  Cyclic GFR-binding peptide
SSLSILFFVGRKPKVLKVYPDKGVVTY

SEQ ID NO: 122575 - protein, 27 aa, Artificial Sequence
  Cyclic GFR-binding peptide
SSLSILFFDAANNVVLKVYPDKGVVTY

SEQ ID NO: 122576 - protein, 27 aa, Artificial Sequence
  Cyclic GFR-binding peptide
SSLSVLFFDSSNNVILKVYPDKGVVTY

SEQ ID NO: 122577 - protein, 27 aa, Artificial Sequence
  Cyclic GFR-binding peptide
SSLSMLFFNDKQQIILKVYPDKGVVTY

SEQ ID NO: 122578 - protein, 27 aa, Artificial Sequence
  Cyclic GFR-binding peptide
SSLSMLFFDNGRVLLLKVYPDKGVVTY

SEQ ID NO: 122579 - protein, 27 aa, Artificial Sequence
  Cyclic GFR-binding peptide
SSLSILFFVGRTPKVLKVYPDKGVVTY

SEQ ID NO: 122580 - protein, 27 aa, Artificial Sequence
  Cyclic GFR-binding peptide
SSLSILFFDSANNVVLKVYPDKGVVTY

SEQ ID NO: 122581 - protein, 27 aa, Artificial Sequence
  Cyclic GFR-binding peptide
SSLSILFFIGKTPKILKVYPDKGVVTY

SEQ ID NO: 122582 - protein, 27 aa, Artificial Sequence
  Cyclic GFR-binding peptide
SSLSVLFFDDMGVPTLKVYPDKGVVTY

SEQ ID NO: 122583 - protein, 27 aa, Artificial Sequence
  Cyclic GFR-binding peptide
SSLSILFFDKGVVTYLKVYPDKGVVTY

SEQ ID NO: 122584 - protein, 27 aa, Artificial Sequence
  Cyclic GFR-binding peptide
SSLSMLFFDEYDKVVLKVYPDKGVVTY

SEQ ID NO: 122585 - protein, 27 aa, Artificial Sequence
  Cyclic GFR-binding peptide
SSLSVLFFDDSSNVILKVYPDKGVVTY

SEQ ID NO: 122586 - protein, 29 aa, Artificial Sequence
  Cyclic GFR-binding peptide
SSLSVLFFEYVRKKPKLLKVYPDKGVVTY

SEQ ID NO: 122587 - protein, 27 aa, Artificial Sequence
  Cyclic GFR-binding peptide
DKGVVTYNSLQEVVKDYEDYYLMTLPE

SEQ ID NO: 122588 - protein, 27 aa, Artificial Sequence
  Cyclic GFR-binding peptide
DKGVVTYNSLQEIKPTKGIYYVIPLPE

SEQ ID NO: 122589 - protein, 27 aa, Artificial Sequence
  Cyclic GFR-binding peptide
DKGVVTYSMEGIIVNSSDDMIQVTINS

SEQ ID NO: 122590 - protein, 27 aa, Artificial Sequence
  Cyclic GFR-binding peptide
DKGVVTYNSLQEVKPKRGVYYLITLPE

SEQ ID NO: 122591 - protein, 27 aa, Artificial Sequence
  Cyclic GFR-binding peptide
DKGVVTYNSLQEVKPTRGVYYVIPLPE

SEQ ID NO: 122592 - protein, 27 aa, Artificial Sequence
  Cyclic GFR-binding peptide
DKGVVTYVTAKKVVKENEDIKRMQVPR

SEQ ID NO: 122593 - protein, 27 aa, Artificial Sequence
  Cyclic GFR-binding peptide
DKGVVTYNSLQEIVNSSDDYYVVPLPE

SEQ ID NO: 122594 - protein, 29 aa, Artificial Sequence
  Cyclic GFR-binding peptide
DKGVVTYSMEGIHQGQHPKIRMIQMTINS

SEQ ID NO: 122595 - protein, 29 aa, Artificial Sequence
  Cyclic GFR-binding peptide
DKGVVTYVTAKKLKPKKRVYEIKRVQVPR

SEQ ID NO: 122596 - protein, 27 aa, Artificial Sequence
  Cyclic GFR-binding peptide
DKGVVTYSMEGIVVKDYEDMIQMTINS

SEQ ID NO: 122597 - protein, 29 aa, Artificial Sequence
  Cyclic GFR-binding peptide
DKGVVTYVQVEKHQGQHPKIRVKAMKVSR

SEQ ID NO: 122598 - protein, 27 aa, Artificial Sequence
  Cyclic GFR-binding peptide
DKGVVTYVTAKKIKPTKGIIKRIQVPR

SEQ ID NO: 122599 - protein, 27 aa, Artificial Sequence
  Cyclic GFR-binding peptide
DKGVVTYSMEGIVKPTRGVMIQITINS

SEQ ID NO: 122600 - protein, 29 aa, Artificial Sequence
  Cyclic GFR-binding peptide
DKGVVTYNSLQEFIPKKRVIEYYVVPLPE

SEQ ID NO: 122601 - protein, 27 aa, Artificial Sequence
  Cyclic GFR-binding peptide
DKGVVTYVQVEKVKPKRGVVKAIKVSR

SEQ ID NO: 122602 - protein, 27 aa, Artificial Sequence
  Cyclic GFR-binding peptide
DKGVVTYVQVEKVVKENEDVKAMKVSR

SEQ ID NO: 122603 - protein, 27 aa, Artificial Sequence
  Cyclic GFR-binding peptide
DKGVVTYNSLQEVVKENEDYYVMPLPE

SEQ ID NO: 122604 - protein, 27 aa, Artificial Sequence
  Cyclic GFR-binding peptide
DKGVVTYVTAKKIVNSSDDIKRVQVPR

SEQ ID NO: 122605 - protein, 27 aa, Artificial Sequence
  Cyclic GFR-binding peptide
DKGVVTYVQVEKIKPTKGIVKAIKVSR

SEQ ID NO: 122606 - protein, 27 aa, Artificial Sequence
  Cyclic GFR-binding peptide
DKGVVTYNSLQEIKPTKGIYYLITLPE

SEQ ID NO: 122607 - protein, 29 aa, Artificial Sequence
  Cyclic GFR-binding peptide
DKGVVTYNSLQEFIPKKRVIEYYLVTLPE

SEQ ID NO: 122608 - protein, 27 aa, Artificial Sequence
  Cyclic GFR-binding peptide
DKGVVTYVQVEKIVNSSDDVKAVKVSR

SEQ ID NO: 122609 - protein, 27 aa, Artificial Sequence
  Cyclic GFR-binding peptide
DKGVVTYNSLQEIVNSSDDYYLVTLPE

SEQ ID NO: 122610 - protein, 29 aa, Artificial Sequence
  Cyclic GFR-binding peptide
DKGVVTYVQVEKLKPKKRVYEVKAVKVSR

SEQ ID NO: 122611 - protein, 29 aa, Artificial Sequence
  Cyclic GFR-binding peptide
DKGVVTYVQVEKFIPKKRVIEVKAVKVSR

SEQ ID NO: 122612 - protein, 29 aa, Artificial Sequence
  Cyclic GFR-binding peptide
DKGVVTYVTAKKHQGQHPKIRIKRMQVPR

SEQ ID NO: 122613 - protein, 27 aa, Artificial Sequence
  Cyclic GFR-binding peptide
DKGVVTYNSLQEVVKENEDYYLMTLPE

SEQ ID NO: 122614 - protein, 29 aa, Artificial Sequence
  Cyclic GFR-binding peptide
DKGVVTYSMEGIFIPKKRVIEMIQVTINS

SEQ ID NO: 122615 - protein, 27 aa, Artificial Sequence
  Cyclic GFR-binding peptide
DKGVVTYNSLQEVKPKRGVYYVIPLPE

SEQ ID NO: 122616 - protein, 27 aa, Artificial Sequence
  Cyclic GFR-binding peptide
DKGVVTYVTAKKVKPKRGVIKRIQVPR

SEQ ID NO: 122617 - protein, 27 aa, Artificial Sequence
  Cyclic GFR-binding peptide
DKGVVTYNSLQEVKPTRGVYYLITLPE

SEQ ID NO: 122618 - protein, 27 aa, Artificial Sequence
  Cyclic GFR-binding peptide
DKGVVTYVQVEKVKPTRGVVKAIKVSR

SEQ ID NO: 122619 - protein, 29 aa, Artificial Sequence
  Cyclic GFR-binding peptide
DKGVVTYSMEGILKPKKRVYEMIQVTINS

SEQ ID NO: 122620 - protein, 27 aa, Artificial Sequence
  Cyclic GFR-binding peptide
DKGVVTYNSLQEVVKDYEDYYVMPLPE

SEQ ID NO: 122621 - protein, 27 aa, Artificial Sequence
  Cyclic GFR-binding peptide
DKGVVTYVTAKKVKPTRGVIKRIQVPR

SEQ ID NO: 122622 - protein, 29 aa, Artificial Sequence
  Cyclic GFR-binding peptide
DKGVVTYNSLQELKPKKRVYEYYLVTLPE

SEQ ID NO: 122623 - protein, 27 aa, Artificial Sequence
  Cyclic GFR-binding peptide
DKGVVTYSMEGIVKPKRGVMIQITINS

SEQ ID NO: 122624 - protein, 27 aa, Artificial Sequence
  Cyclic GFR-binding peptide
DKGVVTYSMEGIVVKENEDMIQMTINS

SEQ ID NO: 122625 - protein, 27 aa, Artificial Sequence
  Cyclic GFR-binding peptide
DKGVVTYSMEGIIKPTKGIMIQITINS

SEQ ID NO: 122626 - protein, 29 aa, Artificial Sequence
  Cyclic GFR-binding peptide
DKGVVTYNSLQEHQGQHPKIRYYLMTLPE

SEQ ID NO: 122627 - protein, 27 aa, Artificial Sequence
  Cyclic GFR-binding peptide
DKGVVTYVTAKKVVKDYEDIKRMQVPR

SEQ ID NO: 122628 - protein, 29 aa, Artificial Sequence
  Cyclic GFR-binding peptide
DKGVVTYNSLQEHQGQHPKIRYYVMPLPE

SEQ ID NO: 122629 - protein, 29 aa, Artificial Sequence
  Cyclic GFR-binding peptide
DKGVVTYNSLQELKPKKRVYEYYVVPLPE

SEQ ID NO: 122630 - protein, 29 aa, Artificial Sequence
  Cyclic GFR-binding peptide
DKGVVTYVTAKKFIPKKRVIEIKRVQVPR

SEQ ID NO: 122631 - protein, 27 aa, Artificial Sequence
  Cyclic GFR-binding peptide
DKGVVTYVQVEKVVKDYEDVKAMKVSR

SEQ ID NO: 122632 - protein, 27 aa, Artificial Sequence
  Cyclic GFR-binding peptide
EPLTMLYYDEYDKVVEQLSNDKGVVTY

SEQ ID NO: 122633 - protein, 27 aa, Artificial Sequence
  Cyclic GFR-binding peptide
EPLPIVYYIGKTPKIEQLSNDKGVVTY

SEQ ID NO: 122634 - protein, 27 aa, Artificial Sequence
  Cyclic GFR-binding peptide
SNITVQIMDDSSNVIIGEMSDKGVVTY

SEQ ID NO: 122635 - protein, 27 aa, Artificial Sequence
  Cyclic GFR-binding peptide
EPLTILYYVGRKPKVEQLSNDKGVVTY

SEQ ID NO: 122636 - protein, 27 aa, Artificial Sequence
  Cyclic GFR-binding peptide
EPLPIVYYVGRTPKVEQLSNDKGVVTY

SEQ ID NO: 122637 - protein, 27 aa, Artificial Sequence
  Cyclic GFR-binding peptide
RPVQMRKIDENEKVVKKATVDKGVVTY

SEQ ID NO: 122638 - protein, 27 aa, Artificial Sequence
  Cyclic GFR-binding peptide
EPLPVVYYDDSSNVIEQLSNDKGVVTY

SEQ ID NO: 122639 - protein, 29 aa, Artificial Sequence
  Cyclic GFR-binding peptide
SNITMQIMRIKPHQGQHIGEMSDKGVVTY

SEQ ID NO: 122640 - protein, 29 aa, Artificial Sequence
  Cyclic GFR-binding peptide
RPVQVRKIEYVRKKPKLKKATVDKGVVTY

SEQ ID NO: 122641 - protein, 27 aa, Artificial Sequence
  Cyclic GFR-binding peptide
SNITMQIMDEYDKVVIGEMSDKGVVTY

SEQ ID NO: 122642 - protein, 29 aa, Artificial Sequence
  Cyclic GFR-binding peptide
RSVKMAKVRIKPHQGQHKEVQVDKGVVTY

SEQ ID NO: 122643 - protein, 27 aa, Artificial Sequence
  Cyclic GFR-binding peptide
RPVQIRKIIGKTPKIKKATVDKGVVTY

SEQ ID NO: 122644 - protein, 27 aa, Artificial Sequence
  Cyclic GFR-binding peptide
SNITIQIMVGRTPKVIGEMSDKGVVTY

SEQ ID NO: 122645 - protein, 29 aa, Artificial Sequence
  Cyclic GFR-binding peptide
EPLPVVYYEIVRKKPIFEQLSNDKGVVTY

SEQ ID NO: 122646 - protein, 27 aa, Artificial Sequence
  Cyclic GFR-binding peptide
RSVKIAKVVGRKPKVKEVQVDKGVVTY

SEQ ID NO: 122647 - protein, 27 aa, Artificial Sequence
  Cyclic GFR-binding peptide
RSVKMAKVDENEKVVKEVQVDKGVVTY

SEQ ID NO: 122648 - protein, 27 aa, Artificial Sequence
  Cyclic GFR-binding peptide
EPLPMVYYDENEKVVEQLSNDKGVVTY

SEQ ID NO: 122649 - protein, 27 aa, Artificial Sequence
  Cyclic GFR-binding peptide
RPVQVRKIDDSSNVIKKATVDKGVVTY

SEQ ID NO: 122650 - protein, 27 aa, Artificial Sequence
  Cyclic GFR-binding peptide
RSVKIAKVIGKTPKIKEVQVDKGVVTY

SEQ ID NO: 122651 - protein, 27 aa, Artificial Sequence
  Cyclic GFR-binding peptide
EPLTILYYIGKTPKIEQLSNDKGVVTY

SEQ ID NO: 122652 - protein, 29 aa, Artificial Sequence
  Cyclic GFR-binding peptide
EPLTVLYYEIVRKKPIFEQLSNDKGVVTY

SEQ ID NO: 122653 - protein, 27 aa, Artificial Sequence
  Cyclic GFR-binding peptide
RSVKVAKVDDSSNVIKEVQVDKGVVTY

SEQ ID NO: 122654 - protein, 27 aa, Artificial Sequence
  Cyclic GFR-binding peptide
EPLTVLYYDDSSNVIEQLSNDKGVVTY

SEQ ID NO: 122655 - protein, 29 aa, Artificial Sequence
  Cyclic GFR-binding peptide
RSVKVAKVEYVRKKPKLKEVQVDKGVVTY

SEQ ID NO: 122656 - protein, 29 aa, Artificial Sequence
  Cyclic GFR-binding peptide
RSVKVAKVEIVRKKPIFKEVQVDKGVVTY

SEQ ID NO: 122657 - protein, 29 aa, Artificial Sequence
  Cyclic GFR-binding peptide
RPVQMRKIRIKPHQGQHKKATVDKGVVTY

SEQ ID NO: 122658 - protein, 27 aa, Artificial Sequence
  Cyclic GFR-binding peptide
EPLTMLYYDENEKVVEQLSNDKGVVTY

SEQ ID NO: 122659 - protein, 29 aa, Artificial Sequence
  Cyclic GFR-binding peptide
SNITVQIMEIVRKKPIFIGEMSDKGVVTY

SEQ ID NO: 122660 - protein, 27 aa, Artificial Sequence
  Cyclic GFR-binding peptide
EPLPIVYYVGRKPKVEQLSNDKGVVTY

SEQ ID NO: 122661 - protein, 27 aa, Artificial Sequence
  Cyclic GFR-binding peptide
RPVQIRKIVGRKPKVKKATVDKGVVTY

SEQ ID NO: 122662 - protein, 27 aa, Artificial Sequence
  Cyclic GFR-binding peptide
EPLTILYYVGRTPKVEQLSNDKGVVTY

SEQ ID NO: 122663 - protein, 27 aa, Artificial Sequence
  Cyclic GFR-binding peptide
RSVKIAKVVGRTPKVKEVQVDKGVVTY

SEQ ID NO: 122664 - protein, 29 aa, Artificial Sequence
  Cyclic GFR-binding peptide
SNITVQIMEYVRKKPKLIGEMSDKGVVTY

SEQ ID NO: 122665 - protein, 27 aa, Artificial Sequence
  Cyclic GFR-binding peptide
EPLPMVYYDEYDKVVEQLSNDKGVVTY

SEQ ID NO: 122666 - protein, 27 aa, Artificial Sequence
  Cyclic GFR-binding peptide
RPVQIRKIVGRTPKVKKATVDKGVVTY

SEQ ID NO: 122667 - protein, 29 aa, Artificial Sequence
  Cyclic GFR-binding peptide
EPLTVLYYEYVRKKPKLEQLSNDKGVVTY

SEQ ID NO: 122668 - protein, 27 aa, Artificial Sequence
  Cyclic GFR-binding peptide
SNITIQIMVGRKPKVIGEMSDKGVVTY

SEQ ID NO: 122669 - protein, 27 aa, Artificial Sequence
  Cyclic GFR-binding peptide
SNITMQIMDENEKVVIGEMSDKGVVTY

SEQ ID NO: 122670 - protein, 27 aa, Artificial Sequence
  Cyclic GFR-binding peptide
SNITIQIMIGKTPKIIGEMSDKGVVTY

SEQ ID NO: 122671 - protein, 29 aa, Artificial Sequence
  Cyclic GFR-binding peptide
EPLTMLYYRIKPHQGQHEQLSNDKGVVTY

SEQ ID NO: 122672 - protein, 27 aa, Artificial Sequence
  Cyclic GFR-binding peptide
RPVQMRKIDEYDKVVKKATVDKGVVTY

SEQ ID NO: 122673 - protein, 29 aa, Artificial Sequence
  Cyclic GFR-binding peptide
EPLPMVYYRIKPHQGQHEQLSNDKGVVTY

SEQ ID NO: 122674 - protein, 29 aa, Artificial Sequence
  Cyclic GFR-binding peptide
EPLPVVYYEYVRKKPKLEQLSNDKGVVTY

SEQ ID NO: 122675 - protein, 29 aa, Artificial Sequence
  Cyclic GFR-binding peptide
RPVQVRKIEIVRKKPIFKKATVDKGVVTY

SEQ ID NO: 122676 - protein, 27 aa, Artificial Sequence
  Cyclic GFR-binding peptide
RSVKMAKVDEYDKVVKEVQVDKGVVTY

SEQ ID NO: 122677 - protein, 27 aa, Artificial Sequence
  Cyclic GFR-binding peptide
DKGVVTYRYKKLIIQQKDNFYLMSIAN

SEQ ID NO: 122678 - protein, 27 aa, Artificial Sequence
  Cyclic GFR-binding peptide
DKGVVTYRYKKLIVNNSSDFYLVSIAN

SEQ ID NO: 122679 - protein, 27 aa, Artificial Sequence
  Cyclic GFR-binding peptide
DKGVVTYRYKKLYTVVGKDFYLISIAN

SEQ ID NO: 122680 - protein, 27 aa, Artificial Sequence
  Cyclic GFR-binding peptide
DKGVVTYRYKKLIVNSSDDFYLVSIAN

SEQ ID NO: 122681 - protein, 27 aa, Artificial Sequence
  Cyclic GFR-binding peptide
DKGVVTYRYKKLVVKDYEDFYLMSIAN

SEQ ID NO: 122682 - protein, 27 aa, Artificial Sequence
  Cyclic GFR-binding peptide
DKGVVTYRYKKLLLVRGNDFYLMSIAN

SEQ ID NO: 122683 - protein, 27 aa, Artificial Sequence
  Cyclic GFR-binding peptide
DKGVVTYRYKKLVVKENEDFYLMSIAN

SEQ ID NO: 122684 - protein, 27 aa, Artificial Sequence
  Cyclic GFR-binding peptide
DKGVVTYRYKKLVVNNAADFYLISIAN

SEQ ID NO: 122685 - protein, 27 aa, Artificial Sequence
  Cyclic GFR-binding peptide
DKGVVTYRYKKLTPVGMDDFYLVSIAN

SEQ ID NO: 122686 - protein, 27 aa, Artificial Sequence
  Cyclic GFR-binding peptide
DKGVVTYRYKKLVVNNASDFYLISIAN

SEQ ID NO: 122687 - protein, 27 aa, Artificial Sequence
  Cyclic GFR-binding peptide
NAISMLYFNDKQQIILKKYRDKGVVTY

SEQ ID NO: 122688 - protein, 27 aa, Artificial Sequence
  Cyclic GFR-binding peptide
NAISVLYFDSSNNVILKKYRDKGVVTY

SEQ ID NO: 122689 - protein, 27 aa, Artificial Sequence
  Cyclic GFR-binding peptide
NAISILYFDKGVVTYLKKYRDKGVVTY

SEQ ID NO: 122690 - protein, 27 aa, Artificial Sequence
  Cyclic GFR-binding peptide
NAISVLYFDDSSNVILKKYRDKGVVTY

SEQ ID NO: 122691 - protein, 27 aa, Artificial Sequence
  Cyclic GFR-binding peptide
NAISMLYFDEYDKVVLKKYRDKGVVTY

SEQ ID NO: 122692 - protein, 27 aa, Artificial Sequence
  Cyclic GFR-binding peptide
NAISMLYFDNGRVLLLKKYRDKGVVTY

SEQ ID NO: 122693 - protein, 27 aa, Artificial Sequence
  Cyclic GFR-binding peptide
NAISMLYFDENEKVVLKKYRDKGVVTY

SEQ ID NO: 122694 - protein, 27 aa, Artificial Sequence
  Cyclic GFR-binding peptide
NAISILYFDAANNVVLKKYRDKGVVTY

SEQ ID NO: 122695 - protein, 27 aa, Artificial Sequence
  Cyclic GFR-binding peptide
NAISVLYFDDMGVPTLKKYRDKGVVTY

SEQ ID NO: 122696 - protein, 27 aa, Artificial Sequence
  Cyclic GFR-binding peptide
NAISILYFDSANNVVLKKYRDKGVVTY

SEQ ID NO: 122697 - protein, 27 aa, Artificial Sequence
  Cyclic GFR-binding peptide
DKGVVTYEYKFKVKPTRGVLYLISIPE

SEQ ID NO: 122698 - protein, 27 aa, Artificial Sequence
  Cyclic GFR-binding peptide
DKGVVTYYHYKLVVKDYEDKYLMSIPS

SEQ ID NO: 122699 - protein, 27 aa, Artificial Sequence
  Cyclic GFR-binding peptide
DKGVVTYEYKFKTPVGMDDLYLVSIPE

SEQ ID NO: 122700 - protein, 27 aa, Artificial Sequence
  Cyclic GFR-binding peptide
DKGVVTYRYKKLVVKDYEDFYLMSIAN

SEQ ID NO: 122701 - protein, 27 aa, Artificial Sequence
  Cyclic GFR-binding peptide
DKGVVTYRHKRLVKPKRGVYYLISTAS

SEQ ID NO: 122702 - protein, 27 aa, Artificial Sequence
  Cyclic GFR-binding peptide
DKGVVTYYHYKLVKPKRGVKYLISIPS

SEQ ID NO: 122703 - protein, 27 aa, Artificial Sequence
  Cyclic GFR-binding peptide
DKGVVTYEYKFKIKPTKGILYLISIPE

SEQ ID NO: 122704 - protein, 27 aa, Artificial Sequence
  Cyclic GFR-binding peptide
DKGVVTYEYKFKVVNKNEDLYLISIPE

SEQ ID NO: 122705 - protein, 27 aa, Artificial Sequence
  Cyclic GFR-binding peptide
DKGVVTYPIKGYVKPTRGVFYLINIPS

SEQ ID NO: 122706 - protein, 27 aa, Artificial Sequence
  Cyclic GFR-binding peptide
DKGVVTYPIKGYVVKENEDFYLMNIPS

SEQ ID NO: 122707 - protein, 27 aa, Artificial Sequence
  Cyclic GFR-binding peptide
DKGVVTYYHYKLYTVVGKDKYLISIPS

SEQ ID NO: 122708 - protein, 27 aa, Artificial Sequence
  Cyclic GFR-binding peptide
DKGVVTYEYKFKLLVRGNDLYLMSIPE

SEQ ID NO: 122709 - protein, 27 aa, Artificial Sequence
  Cyclic GFR-binding peptide
DKGVVTYRYKKLVKPKRGVFYLISIAN

SEQ ID NO: 122710 - protein, 27 aa, Artificial Sequence
  Cyclic GFR-binding peptide
DKGVVTYPIKGYTPVGMDDFYLVNIPS

SEQ ID NO: 122711 - protein, 27 aa, Artificial Sequence
  Cyclic GFR-binding peptide
DKGVVTYYHYKLVVNKNEDKYLISIPS

SEQ ID NO: 122712 - protein, 27 aa, Artificial Sequence
  Cyclic GFR-binding peptide
DKGVVTYYHYKLIVNSSDDKYLVSIPS

SEQ ID NO: 122713 - protein, 27 aa, Artificial Sequence
  Cyclic GFR-binding peptide
DKGVVTYPIKGYIVNSSDDFYLVNIPS

SEQ ID NO: 122714 - protein, 27 aa, Artificial Sequence
  Cyclic GFR-binding peptide
DKGVVTYRYKKLYTVVGKDFYLISIAN

SEQ ID NO: 122715 - protein, 27 aa, Artificial Sequence
  Cyclic GFR-binding peptide
DKGVVTYRHKRLLLVRGNDYYLMSTAS

SEQ ID NO: 122716 - protein, 27 aa, Artificial Sequence
  Cyclic GFR-binding peptide
DKGVVTYYHYKLLLVRGNDKYLMSIPS

SEQ ID NO: 122717 - protein, 27 aa, Artificial Sequence
  Cyclic GFR-binding peptide
DKGVVTYRYKKLIVNSSDDFYLVSIAN

SEQ ID NO: 122718 - protein, 27 aa, Artificial Sequence
  Cyclic GFR-binding peptide
DKGVVTYRHKRLVVNKNEDYYLISTAS

SEQ ID NO: 122719 - protein, 27 aa, Artificial Sequence
  Cyclic GFR-binding peptide
DKGVVTYRHKRLIKPTKGIYYLISTAS

SEQ ID NO: 122720 - protein, 27 aa, Artificial Sequence
  Cyclic GFR-binding peptide
DKGVVTYPIKGYYTVVGKDFYLINIPS

SEQ ID NO: 122721 - protein, 27 aa, Artificial Sequence
  Cyclic GFR-binding peptide
DKGVVTYYHYKLTPVGMDDKYLVSIPS

SEQ ID NO: 122722 - protein, 27 aa, Artificial Sequence
  Cyclic GFR-binding peptide
DKGVVTYRHKRLIVNNSSDYYLVSTAS

SEQ ID NO: 122723 - protein, 27 aa, Artificial Sequence
  Cyclic GFR-binding peptide
DKGVVTYRYKKLLLVRGNDFYLMSIAN

SEQ ID NO: 122724 - protein, 27 aa, Artificial Sequence
  Cyclic GFR-binding peptide
DKGVVTYYHYKLVKPTRGVKYLISIPS

SEQ ID NO: 122725 - protein, 27 aa, Artificial Sequence
  Cyclic GFR-binding peptide
DKGVVTYRHKRLIVNSSDDYYLVSTAS

SEQ ID NO: 122726 - protein, 27 aa, Artificial Sequence
  Cyclic GFR-binding peptide
DKGVVTYPIKGYLLVRGNDFYLMNIPS

SEQ ID NO: 122727 - protein, 27 aa, Artificial Sequence
  Cyclic GFR-binding peptide
DKGVVTYRYKKLVVNKNEDFYLISIAN

SEQ ID NO: 122728 - protein, 27 aa, Artificial Sequence
  Cyclic GFR-binding peptide
DKGVVTYEYKFKVVKDYEDLYLMSIPE

SEQ ID NO: 122729 - protein, 27 aa, Artificial Sequence
  Cyclic GFR-binding peptide
DKGVVTYPIKGYVVNKNEDFYLINIPS

SEQ ID NO: 122730 - protein, 27 aa, Artificial Sequence
  Cyclic GFR-binding peptide
DKGVVTYPIKGYIKPTKGIFYLINIPS

SEQ ID NO: 122731 - protein, 27 aa, Artificial Sequence
  Cyclic GFR-binding peptide
DKGVVTYEYKFKVVNNAADLYLISIPE

SEQ ID NO: 122732 - protein, 27 aa, Artificial Sequence
  Cyclic GFR-binding peptide
DKGVVTYRHKRLYTVVGKDYYLISTAS

SEQ ID NO: 122733 - protein, 27 aa, Artificial Sequence
  Cyclic GFR-binding peptide
DKGVVTYRYKKLIKPTKGIFYLISIAN

SEQ ID NO: 122734 - protein, 27 aa, Artificial Sequence
  Cyclic GFR-binding peptide
DKGVVTYPIKGYVVKDYEDFYLMNIPS

SEQ ID NO: 122735 - protein, 27 aa, Artificial Sequence
  Cyclic GFR-binding peptide
DKGVVTYEYKFKVVNNASDLYLISIPE

SEQ ID NO: 122736 - protein, 27 aa, Artificial Sequence
  Cyclic GFR-binding peptide
DKGVVTYRYKKLVKPTRGVFYLISIAN

SEQ ID NO: 122737 - protein, 27 aa, Artificial Sequence
  Cyclic GFR-binding peptide
DKGVVTYRHKRLVVKENEDYYLMSTAS

SEQ ID NO: 122738 - protein, 27 aa, Artificial Sequence
  Cyclic GFR-binding peptide
DKGVVTYYHYKLIKPTKGIKYLISIPS

SEQ ID NO: 122739 - protein, 27 aa, Artificial Sequence
  Cyclic GFR-binding peptide
DKGVVTYYHYKLVVKENEDKYLMSIPS

SEQ ID NO: 122740 - protein, 27 aa, Artificial Sequence
  Cyclic GFR-binding peptide
DKGVVTYRHKRLIIQQKDNYYLMSTAS

SEQ ID NO: 122741 - protein, 27 aa, Artificial Sequence
  Cyclic GFR-binding peptide
DKGVVTYRYKKLVVKENEDFYLMSIAN

SEQ ID NO: 122742 - protein, 27 aa, Artificial Sequence
  Cyclic GFR-binding peptide
DKGVVTYRYKKLVVNNAADFYLISIAN

SEQ ID NO: 122743 - protein, 27 aa, Artificial Sequence
  Cyclic GFR-binding peptide
DKGVVTYEYKFKIIQQKDNLYLMSIPE

SEQ ID NO: 122744 - protein, 27 aa, Artificial Sequence
  Cyclic GFR-binding peptide
DKGVVTYRYKKLTPVGMDDFYLVSIAN

SEQ ID NO: 122745 - protein, 27 aa, Artificial Sequence
  Cyclic GFR-binding peptide
DKGVVTYYHYKLVVNNAADKYLISIPS

SEQ ID NO: 122746 - protein, 27 aa, Artificial Sequence
  Cyclic GFR-binding peptide
DKGVVTYPIKGYIVNNSSDFYLVNIPS

SEQ ID NO: 122747 - protein, 27 aa, Artificial Sequence
  Cyclic GFR-binding peptide
DKGVVTYPIKGYVKPKRGVFYLINIPS

SEQ ID NO: 122748 - protein, 27 aa, Artificial Sequence
  Cyclic GFR-binding peptide
DKGVVTYRYKKLIIQQKDNFYLMSIAN

SEQ ID NO: 122749 - protein, 27 aa, Artificial Sequence
  Cyclic GFR-binding peptide
DKGVVTYPIKGYIIQQKDNFYLMNIPS

SEQ ID NO: 122750 - protein, 27 aa, Artificial Sequence
  Cyclic GFR-binding peptide
DKGVVTYRYKKLIVNNSSDFYLVSIAN

SEQ ID NO: 122751 - protein, 27 aa, Artificial Sequence
  Cyclic GFR-binding peptide
DKGVVTYPIKGYVVNNAADFYLINIPS

SEQ ID NO: 122752 - protein, 27 aa, Artificial Sequence
  Cyclic GFR-binding peptide
DKGVVTYRHKRLVKPTRGVYYLISTAS

SEQ ID NO: 122753 - protein, 27 aa, Artificial Sequence
  Cyclic GFR-binding peptide
DKGVVTYEYKFKIVNNSSDLYLVSIPE

SEQ ID NO: 122754 - protein, 27 aa, Artificial Sequence
  Cyclic GFR-binding peptide
DKGVVTYRHKRLVVNNASDYYLISTAS

SEQ ID NO: 122755 - protein, 27 aa, Artificial Sequence
  Cyclic GFR-binding peptide
DKGVVTYRHKRLTPVGMDDYYLVSTAS

SEQ ID NO: 122756 - protein, 27 aa, Artificial Sequence
  Cyclic GFR-binding peptide
DKGVVTYYHYKLIVNNSSDKYLVSIPS

SEQ ID NO: 122757 - protein, 27 aa, Artificial Sequence
  Cyclic GFR-binding peptide
DKGVVTYYHYKLVVNNASDKYLISIPS

SEQ ID NO: 122758 - protein, 27 aa, Artificial Sequence
  Cyclic GFR-binding peptide
DKGVVTYEYKFKIVNSSDDLYLVSIPE

SEQ ID NO: 122759 - protein, 27 aa, Artificial Sequence
  Cyclic GFR-binding peptide
DKGVVTYEYKFKVKPKRGVLYLISIPE

SEQ ID NO: 122760 - protein, 27 aa, Artificial Sequence
  Cyclic GFR-binding peptide
DKGVVTYRHKRLVVKDYEDYYLMSTAS

SEQ ID NO: 122761 - protein, 27 aa, Artificial Sequence
  Cyclic GFR-binding peptide
DKGVVTYEYKFKVVKENEDLYLMSIPE

SEQ ID NO: 122762 - protein, 27 aa, Artificial Sequence
  Cyclic GFR-binding peptide
DKGVVTYEYKFKYTVVGKDLYLISIPE

SEQ ID NO: 122763 - protein, 27 aa, Artificial Sequence
  Cyclic GFR-binding peptide
DKGVVTYPIKGYVVNNASDFYLINIPS

SEQ ID NO: 122764 - protein, 27 aa, Artificial Sequence
  Cyclic GFR-binding peptide
DKGVVTYYHYKLIIQQKDNKYLMSIPS

SEQ ID NO: 122765 - protein, 27 aa, Artificial Sequence
  Cyclic GFR-binding peptide
DKGVVTYRYKKLVVNNASDFYLISIAN

SEQ ID NO: 122766 - protein, 27 aa, Artificial Sequence
  Cyclic GFR-binding peptide
DKGVVTYRHKRLVVNNAADYYLISTAS

SEQ ID NO: 122767 - protein, 27 aa, Artificial Sequence
  Cyclic GFR-binding peptide
EPISILYLVGRTPKVKFKYEDKGVVTY

SEQ ID NO: 122768 - protein, 27 aa, Artificial Sequence
  Cyclic GFR-binding peptide
SPISMLYKDEYDKVVLKYHYDKGVVTY

SEQ ID NO: 122769 - protein, 27 aa, Artificial Sequence
  Cyclic GFR-binding peptide
EPISVLYLDDMGVPTKFKYEDKGVVTY

SEQ ID NO: 122770 - protein, 27 aa, Artificial Sequence
  Cyclic GFR-binding peptide
NAISMLYFDEYDKVVLKKYRDKGVVTY

SEQ ID NO: 122771 - protein, 27 aa, Artificial Sequence
  Cyclic GFR-binding peptide
SATSILYYVGRKPKVLRKHRDKGVVTY

SEQ ID NO: 122772 - protein, 27 aa, Artificial Sequence
  Cyclic GFR-binding peptide
SPISILYKVGRKPKVLKYHYDKGVVTY

SEQ ID NO: 122773 - protein, 27 aa, Artificial Sequence
  Cyclic GFR-binding peptide
EPISILYLIGKTPKIKFKYEDKGVVTY

SEQ ID NO: 122774 - protein, 27 aa, Artificial Sequence
  Cyclic GFR-binding peptide
EPISILYLDENKNVVKFKYEDKGVVTY

SEQ ID NO: 122775 - protein, 27 aa, Artificial Sequence
  Cyclic GFR-binding peptide
SPINILYFVGRTPKVYGKIPDKGVVTY

SEQ ID NO: 122776 - protein, 27 aa, Artificial Sequence
  Cyclic GFR-binding peptide
SPINMLYFDENEKVVYGKIPDKGVVTY

SEQ ID NO: 122777 - protein, 27 aa, Artificial Sequence
  Cyclic GFR-binding peptide
SPISILYKDKGVVTYLKYHYDKGVVTY

SEQ ID NO: 122778 - protein, 27 aa, Artificial Sequence
  Cyclic GFR-binding peptide
EPISMLYLDNGRVLLKFKYEDKGVVTY

SEQ ID NO: 122779 - protein, 27 aa, Artificial Sequence
  Cyclic GFR-binding peptide
NAISILYFVGRKPKVLKKYRDKGVVTY

SEQ ID NO: 122780 - protein, 27 aa, Artificial Sequence
  Cyclic GFR-binding peptide
SPINVLYFDDMGVPTYGKIPDKGVVTY

SEQ ID NO: 122781 - protein, 27 aa, Artificial Sequence
  Cyclic GFR-binding peptide
SPISILYKDENKNVVLKYHYDKGVVTY

SEQ ID NO: 122782 - protein, 27 aa, Artificial Sequence
  Cyclic GFR-binding peptide
SPISVLYKDDSSNVILKYHYDKGVVTY

SEQ ID NO: 122783 - protein, 27 aa, Artificial Sequence
  Cyclic GFR-binding peptide
SPINVLYFDDSSNVIYGKIPDKGVVTY

SEQ ID NO: 122784 - protein, 27 aa, Artificial Sequence
  Cyclic GFR-binding peptide
NAISILYFDKGVVTYLKKYRDKGVVTY

SEQ ID NO: 122785 - protein, 27 aa, Artificial Sequence
  Cyclic GFR-binding peptide
SATSMLYYDNGRVLLLRKHRDKGVVTY

SEQ ID NO: 122786 - protein, 27 aa, Artificial Sequence
  Cyclic GFR-binding peptide
SPISMLYKDNGRVLLLKYHYDKGVVTY

SEQ ID NO: 122787 - protein, 27 aa, Artificial Sequence
  Cyclic GFR-binding peptide
NAISVLYFDDSSNVILKKYRDKGVVTY

SEQ ID NO: 122788 - protein, 27 aa, Artificial Sequence
  Cyclic GFR-binding peptide
SATSILYYDENKNVVLRKHRDKGVVTY

SEQ ID NO: 122789 - protein, 27 aa, Artificial Sequence
  Cyclic GFR-binding peptide
SATSILYYIGKTPKILRKHRDKGVVTY

SEQ ID NO: 122790 - protein, 27 aa, Artificial Sequence
  Cyclic GFR-binding peptide
SPINILYFDKGVVTYYGKIPDKGVVTY

SEQ ID NO: 122791 - protein, 27 aa, Artificial Sequence
  Cyclic GFR-binding peptide
SPISVLYKDDMGVPTLKYHYDKGVVTY

SEQ ID NO: 122792 - protein, 27 aa, Artificial Sequence
  Cyclic GFR-binding peptide
SATSVLYYDSSNNVILRKHRDKGVVTY

SEQ ID NO: 122793 - protein, 27 aa, Artificial Sequence
  Cyclic GFR-binding peptide
NAISMLYFDNGRVLLLKKYRDKGVVTY

SEQ ID NO: 122794 - protein, 27 aa, Artificial Sequence
  Cyclic GFR-binding peptide
SPISILYKVGRTPKVLKYHYDKGVVTY

SEQ ID NO: 122795 - protein, 27 aa, Artificial Sequence
  Cyclic GFR-binding peptide
SATSVLYYDDSSNVILRKHRDKGVVTY

SEQ ID NO: 122796 - protein, 27 aa, Artificial Sequence
  Cyclic GFR-binding peptide
SPINMLYFDNGRVLLYGKIPDKGVVTY

SEQ ID NO: 122797 - protein, 27 aa, Artificial Sequence
  Cyclic GFR-binding peptide
NAISILYFDENKNVVLKKYRDKGVVTY

SEQ ID NO: 122798 - protein, 27 aa, Artificial Sequence
  Cyclic GFR-binding peptide
EPISMLYLDEYDKVVKFKYEDKGVVTY

SEQ ID NO: 122799 - protein, 27 aa, Artificial Sequence
  Cyclic GFR-binding peptide
SPINILYFDENKNVVYGKIPDKGVVTY

SEQ ID NO: 122800 - protein, 27 aa, Artificial Sequence
  Cyclic GFR-binding peptide
SPINILYFIGKTPKIYGKIPDKGVVTY

SEQ ID NO: 122801 - protein, 27 aa, Artificial Sequence
  Cyclic GFR-binding peptide
EPISILYLDAANNVVKFKYEDKGVVTY

SEQ ID NO: 122802 - protein, 27 aa, Artificial Sequence
  Cyclic GFR-binding peptide
SATSILYYDKGVVTYLRKHRDKGVVTY

SEQ ID NO: 122803 - protein, 27 aa, Artificial Sequence
  Cyclic GFR-binding peptide
NAISILYFIGKTPKILKKYRDKGVVTY

SEQ ID NO: 122804 - protein, 27 aa, Artificial Sequence
  Cyclic GFR-binding peptide
SPINMLYFDEYDKVVYGKIPDKGVVTY

SEQ ID NO: 122805 - protein, 27 aa, Artificial Sequence
  Cyclic GFR-binding peptide
EPISILYLDSANNVVKFKYEDKGVVTY

SEQ ID NO: 122806 - protein, 27 aa, Artificial Sequence
  Cyclic GFR-binding peptide
NAISILYFVGRTPKVLKKYRDKGVVTY

SEQ ID NO: 122807 - protein, 27 aa, Artificial Sequence
  Cyclic GFR-binding peptide
SATSMLYYDENEKVVLRKHRDKGVVTY

SEQ ID NO: 122808 - protein, 27 aa, Artificial Sequence
  Cyclic GFR-binding peptide
SPISILYKIGKTPKILKYHYDKGVVTY

SEQ ID NO: 122809 - protein, 27 aa, Artificial Sequence
  Cyclic GFR-binding peptide
SPISMLYKDENEKVVLKYHYDKGVVTY

SEQ ID NO: 122810 - protein, 27 aa, Artificial Sequence
  Cyclic GFR-binding peptide
SATSMLYYNDKQQIILRKHRDKGVVTY

SEQ ID NO: 122811 - protein, 27 aa, Artificial Sequence
  Cyclic GFR-binding peptide
NAISMLYFDENEKVVLKKYRDKGVVTY

SEQ ID NO: 122812 - protein, 27 aa, Artificial Sequence
  Cyclic GFR-binding peptide
NAISILYFDAANNVVLKKYRDKGVVTY

SEQ ID NO: 122813 - protein, 27 aa, Artificial Sequence
  Cyclic GFR-binding peptide
EPISMLYLNDKQQIIKFKYEDKGVVTY

SEQ ID NO: 122814 - protein, 27 aa, Artificial Sequence
  Cyclic GFR-binding peptide
NAISVLYFDDMGVPTLKKYRDKGVVTY

SEQ ID NO: 122815 - protein, 27 aa, Artificial Sequence
  Cyclic GFR-binding peptide
SPISILYKDAANNVVLKYHYDKGVVTY

SEQ ID NO: 122816 - protein, 27 aa, Artificial Sequence
  Cyclic GFR-binding peptide
SPINVLYFDSSNNVIYGKIPDKGVVTY

SEQ ID NO: 122817 - protein, 27 aa, Artificial Sequence
  Cyclic GFR-binding peptide
SPINILYFVGRKPKVYGKIPDKGVVTY

SEQ ID NO: 122818 - protein, 27 aa, Artificial Sequence
  Cyclic GFR-binding peptide
NAISMLYFNDKQQIILKKYRDKGVVTY

SEQ ID NO: 122819 - protein, 27 aa, Artificial Sequence
  Cyclic GFR-binding peptide
SPINMLYFNDKQQIIYGKIPDKGVVTY

SEQ ID NO: 122820 - protein, 27 aa, Artificial Sequence
  Cyclic GFR-binding peptide
NAISVLYFDSSNNVILKKYRDKGVVTY

SEQ ID NO: 122821 - protein, 27 aa, Artificial Sequence
  Cyclic GFR-binding peptide
SPINILYFDAANNVVYGKIPDKGVVTY

SEQ ID NO: 122822 - protein, 27 aa, Artificial Sequence
  Cyclic GFR-binding peptide
SATSILYYVGRTPKVLRKHRDKGVVTY

SEQ ID NO: 122823 - protein, 27 aa, Artificial Sequence
  Cyclic GFR-binding peptide
EPISVLYLDSSNNVIKFKYEDKGVVTY

SEQ ID NO: 122824 - protein, 27 aa, Artificial Sequence
  Cyclic GFR-binding peptide
SATSILYYDSANNVVLRKHRDKGVVTY

SEQ ID NO: 122825 - protein, 27 aa, Artificial Sequence
  Cyclic GFR-binding peptide
SATSVLYYDDMGVPTLRKHRDKGVVTY

SEQ ID NO: 122826 - protein, 27 aa, Artificial Sequence
  Cyclic GFR-binding peptide
SPISVLYKDSSNNVILKYHYDKGVVTY

SEQ ID NO: 122827 - protein, 27 aa, Artificial Sequence
  Cyclic GFR-binding peptide
SPISILYKDSANNVVLKYHYDKGVVTY

SEQ ID NO: 122828 - protein, 27 aa, Artificial Sequence
  Cyclic GFR-binding peptide
EPISVLYLDDSSNVIKFKYEDKGVVTY

SEQ ID NO: 122829 - protein, 27 aa, Artificial Sequence
  Cyclic GFR-binding peptide
EPISILYLVGRKPKVKFKYEDKGVVTY

SEQ ID NO: 122830 - protein, 27 aa, Artificial Sequence
  Cyclic GFR-binding peptide
SATSMLYYDEYDKVVLRKHRDKGVVTY

SEQ ID NO: 122831 - protein, 27 aa, Artificial Sequence
  Cyclic GFR-binding peptide
EPISMLYLDENEKVVKFKYEDKGVVTY

SEQ ID NO: 122832 - protein, 27 aa, Artificial Sequence
  Cyclic GFR-binding peptide
EPISILYLDKGVVTYKFKYEDKGVVTY

SEQ ID NO: 122833 - protein, 27 aa, Artificial Sequence
  Cyclic GFR-binding peptide
SPINILYFDSANNVVYGKIPDKGVVTY

SEQ ID NO: 122834 - protein, 27 aa, Artificial Sequence
  Cyclic GFR-binding peptide
SPISMLYKNDKQQIILKYHYDKGVVTY

SEQ ID NO: 122835 - protein, 27 aa, Artificial Sequence
  Cyclic GFR-binding peptide
NAISILYFDSANNVVLKKYRDKGVVTY

SEQ ID NO: 122836 - protein, 27 aa, Artificial Sequence
  Cyclic GFR-binding peptide
SATSILYYDAANNVVLRKHRDKGVVTY

SEQ ID NO: 122837 - protein, 27 aa, Artificial Sequence
  Cyclic GFR-binding peptide
DKGVVTYSMEGIIIQQKDNMIQMTINS

SEQ ID NO: 122838 - protein, 27 aa, Artificial Sequence
  Cyclic GFR-binding peptide
DKGVVTYSMEGIIVNSSDDMIQVTINS

SEQ ID NO: 122839 - protein, 27 aa, Artificial Sequence
  Cyclic GFR-binding peptide
DKGVVTYSMEGLVKPKRGVMIQITINS

SEQ ID NO: 122840 - protein, 27 aa, Artificial Sequence
  Cyclic GFR-binding peptide
DKGVVTYSMEGLVVNNASDMIQITINS

SEQ ID NO: 122841 - protein, 29 aa, Artificial Sequence
  Cyclic GFR-binding peptide
DKGVVTYSMEGIFIPKKRVIEMIQVTINS

SEQ ID NO: 122842 - protein, 27 aa, Artificial Sequence
  Cyclic GFR-binding peptide
DKGVVTYSMEGILLVRGNDMIQMTINS

SEQ ID NO: 122843 - protein, 29 aa, Artificial Sequence
  Cyclic GFR-binding peptide
DKGVVTYSMEGILKPKKRVYEMIQVTINS

SEQ ID NO: 122844 - protein, 27 aa, Artificial Sequence
  Cyclic GFR-binding peptide
DKGVVTYSMEGLIKPTKGIMIQITINS

SEQ ID NO: 122845 - protein, 27 aa, Artificial Sequence
  Cyclic GFR-binding peptide
DKGVVTYSMEGLIVNSSDDMIQVTINS

SEQ ID NO: 122846 - protein, 29 aa, Artificial Sequence
  Cyclic GFR-binding peptide
DKGVVTYSMEGIHQGQHPKIRMIQMTINS

SEQ ID NO: 122847 - protein, 27 aa, Artificial Sequence
  Cyclic GFR-binding peptide
DKGVVTYSMEGIVVNNASDMIQITINS

SEQ ID NO: 122848 - protein, 29 aa, Artificial Sequence
  Cyclic GFR-binding peptide
DKGVVTYSMEGLLKPKKRVYEMIQVTINS

SEQ ID NO: 122849 - protein, 27 aa, Artificial Sequence
  Cyclic GFR-binding peptide
DKGVVTYSMEGIVKPKRGVMIQITINS

SEQ ID NO: 122850 - protein, 27 aa, Artificial Sequence
  Cyclic GFR-binding peptide
DKGVVTYSMEGIVKPTRGVMIQITINS

SEQ ID NO: 122851 - protein, 27 aa, Artificial Sequence
  Cyclic GFR-binding peptide
DKGVVTYSMEGLVVNNAADMIQITINS

SEQ ID NO: 122852 - protein, 27 aa, Artificial Sequence
  Cyclic GFR-binding peptide
DKGVVTYSMEGLLLVRGNDMIQMTINS

SEQ ID NO: 122853 - protein, 27 aa, Artificial Sequence
  Cyclic GFR-binding peptide
DKGVVTYSMEGIIKPTKGIMIQITINS

SEQ ID NO: 122854 - protein, 27 aa, Artificial Sequence
  Cyclic GFR-binding peptide
DKGVVTYSMEGLIIQQKDNMIQMTINS

SEQ ID NO: 122855 - protein, 29 aa, Artificial Sequence
  Cyclic GFR-binding peptide
DKGVVTYSMEGLHQGQHPKIRMIQMTINS

SEQ ID NO: 122856 - protein, 27 aa, Artificial Sequence
  Cyclic GFR-binding peptide
DKGVVTYSMEGIVVNNAADMIQITINS

SEQ ID NO: 122857 - protein, 29 aa, Artificial Sequence
  Cyclic GFR-binding peptide
DKGVVTYSMEGLFIPKKRVIEMIQVTINS

SEQ ID NO: 122858 - protein, 27 aa, Artificial Sequence
  Cyclic GFR-binding peptide
DKGVVTYSMEGLVKPTRGVMIQITINS

SEQ ID NO: 122859 - protein, 27 aa, Artificial Sequence
  Cyclic GFR-binding peptide
SNITMQIMNDKQQIIIGEMSDKGVVTY

SEQ ID NO: 122860 - protein, 27 aa, Artificial Sequence
  Cyclic GFR-binding peptide
SNITVQIMDDSSNVIIGEMSDKGVVTY

SEQ ID NO: 122861 - protein, 27 aa, Artificial Sequence
  Cyclic GFR-binding peptide
SNITIQIMVGRKPKVLGEMSDKGVVTY

SEQ ID NO: 122862 - protein, 27 aa, Artificial Sequence
  Cyclic GFR-binding peptide
SNITIQIMDSANNVVLGEMSDKGVVTY

SEQ ID NO: 122863 - protein, 29 aa, Artificial Sequence
  Cyclic GFR-binding peptide
SNITVQIMEIVRKKPIFIGEMSDKGVVTY

SEQ ID NO: 122864 - protein, 27 aa, Artificial Sequence
  Cyclic GFR-binding peptide
SNITMQIMDNGRVLLIGEMSDKGVVTY

SEQ ID NO: 122865 - protein, 29 aa, Artificial Sequence
  Cyclic GFR-binding peptide
SNITVQIMEYVRKKPKLIGEMSDKGVVTY

SEQ ID NO: 122866 - protein, 27 aa, Artificial Sequence
  Cyclic GFR-binding peptide
SNITIQIMIGKTPKILGEMSDKGVVTY

SEQ ID NO: 122867 - protein, 27 aa, Artificial Sequence
  Cyclic GFR-binding peptide
SNITVQIMDDSSNVILGEMSDKGVVTY

SEQ ID NO: 122868 - protein, 29 aa, Artificial Sequence
  Cyclic GFR-binding peptide
SNITMQIMRIKPHQGQHIGEMSDKGVVTY

SEQ ID NO: 122869 - protein, 27 aa, Artificial Sequence
  Cyclic GFR-binding peptide
SNITIQIMDSANNVVIGEMSDKGVVTY

SEQ ID NO: 122870 - protein, 29 aa, Artificial Sequence
  Cyclic GFR-binding peptide
SNITVQIMEYVRKKPKLLGEMSDKGVVTY

SEQ ID NO: 122871 - protein, 27 aa, Artificial Sequence
  Cyclic GFR-binding peptide
SNITIQIMVGRKPKVIGEMSDKGVVTY

SEQ ID NO: 122872 - protein, 27 aa, Artificial Sequence
  Cyclic GFR-binding peptide
SNITIQIMVGRTPKVIGEMSDKGVVTY

SEQ ID NO: 122873 - protein, 27 aa, Artificial Sequence
  Cyclic GFR-binding peptide
SNITIQIMDAANNVVLGEMSDKGVVTY

SEQ ID NO: 122874 - protein, 27 aa, Artificial Sequence
  Cyclic GFR-binding peptide
SNITMQIMDNGRVLLLGEMSDKGVVTY

SEQ ID NO: 122875 - protein, 27 aa, Artificial Sequence
  Cyclic GFR-binding peptide
SNITIQIMIGKTPKIIGEMSDKGVVTY

SEQ ID NO: 122876 - protein, 27 aa, Artificial Sequence
  Cyclic GFR-binding peptide
SNITMQIMNDKQQIILGEMSDKGVVTY

SEQ ID NO: 122877 - protein, 29 aa, Artificial Sequence
  Cyclic GFR-binding peptide
SNITMQIMRIKPHQGQHLGEMSDKGVVTY

SEQ ID NO: 122878 - protein, 27 aa, Artificial Sequence
  Cyclic GFR-binding peptide
SNITIQIMDAANNVVIGEMSDKGVVTY

SEQ ID NO: 122879 - protein, 29 aa, Artificial Sequence
  Cyclic GFR-binding peptide
SNITVQIMEIVRKKPIFLGEMSDKGVVTY

SEQ ID NO: 122880 - protein, 27 aa, Artificial Sequence
  Cyclic GFR-binding peptide
SNITIQIMVGRTPKVLGEMSDKGVVTY

SEQ ID NO: 122881 - protein, 27 aa, Artificial Sequence
  Cyclic GFR-binding peptide
DKGVVTYRYKKLIKPTKGIFYLISIAN

SEQ ID NO: 122882 - protein, 27 aa, Artificial Sequence
  Cyclic GFR-binding peptide
DKGVVTYQYNKLVVNKNEDLYLISIAS

SEQ ID NO: 122883 - protein, 27 aa, Artificial Sequence
  Cyclic GFR-binding peptide
DKGVVTYQYNKLVVNNAADLYLISIAS

SEQ ID NO: 122884 - protein, 27 aa, Artificial Sequence
  Cyclic GFR-binding peptide
DKGVVTYQYNKLIVNNSSDLYLVSIAS

SEQ ID NO: 122885 - protein, 27 aa, Artificial Sequence
  Cyclic GFR-binding peptide
DKGVVTYRYKKLVVKDYEDFYLMSIAN

SEQ ID NO: 122886 - protein, 27 aa, Artificial Sequence
  Cyclic GFR-binding peptide
DKGVVTYRYKKLVKPTRGVFYLISIAN

SEQ ID NO: 122887 - protein, 27 aa, Artificial Sequence
  Cyclic GFR-binding peptide
DKGVVTYQYNKLIIQQKDNLYLMSIAS

SEQ ID NO: 122888 - protein, 27 aa, Artificial Sequence
  Cyclic GFR-binding peptide
DKGVVTYQYNKLLLVRGNDLYLMSIAS

SEQ ID NO: 122889 - protein, 27 aa, Artificial Sequence
  Cyclic GFR-binding peptide
DKGVVTYQYNKLVKPTRGVLYLISIAS

SEQ ID NO: 122890 - protein, 27 aa, Artificial Sequence
  Cyclic GFR-binding peptide
DKGVVTYRYKKLVVKENEDFYLMSIAN

SEQ ID NO: 122891 - protein, 27 aa, Artificial Sequence
  Cyclic GFR-binding peptide
DKGVVTYRYKKLVVNNAADFYLISIAN

SEQ ID NO: 122892 - protein, 27 aa, Artificial Sequence
  Cyclic GFR-binding peptide
DKGVVTYQYNKLTPVGMDDLYLVSIAS

SEQ ID NO: 122893 - protein, 27 aa, Artificial Sequence
  Cyclic GFR-binding peptide
DKGVVTYRYKKLTPVGMDDFYLVSIAN

SEQ ID NO: 122894 - protein, 27 aa, Artificial Sequence
  Cyclic GFR-binding peptide
DKGVVTYRYKKLVKPKRGVFYLISIAN

SEQ ID NO: 122895 - protein, 27 aa, Artificial Sequence
  Cyclic GFR-binding peptide
DKGVVTYQYNKLVVKENEDLYLMSIAS

SEQ ID NO: 122896 - protein, 27 aa, Artificial Sequence
  Cyclic GFR-binding peptide
DKGVVTYRYKKLIIQQKDNFYLMSIAN

SEQ ID NO: 122897 - protein, 27 aa, Artificial Sequence
  Cyclic GFR-binding peptide
DKGVVTYQYNKLVKPKRGVLYLISIAS

SEQ ID NO: 122898 - protein, 27 aa, Artificial Sequence
  Cyclic GFR-binding peptide
DKGVVTYRYKKLIVNNSSDFYLVSIAN

SEQ ID NO: 122899 - protein, 27 aa, Artificial Sequence
  Cyclic GFR-binding peptide
DKGVVTYRYKKLYTVVGKDFYLISIAN

SEQ ID NO: 122900 - protein, 27 aa, Artificial Sequence
  Cyclic GFR-binding peptide
DKGVVTYRYKKLIVNSSDDFYLVSIAN

SEQ ID NO: 122901 - protein, 27 aa, Artificial Sequence
  Cyclic GFR-binding peptide
DKGVVTYRYKKLLLVRGNDFYLMSIAN

SEQ ID NO: 122902 - protein, 27 aa, Artificial Sequence
  Cyclic GFR-binding peptide
DKGVVTYQYNKLVVNNASDLYLISIAS

SEQ ID NO: 122903 - protein, 27 aa, Artificial Sequence
  Cyclic GFR-binding peptide
DKGVVTYQYNKLIKPTKGILYLISIAS

SEQ ID NO: 122904 - protein, 27 aa, Artificial Sequence
  Cyclic GFR-binding peptide
DKGVVTYRYKKLVVNKNEDFYLISIAN

SEQ ID NO: 122905 - protein, 27 aa, Artificial Sequence
  Cyclic GFR-binding peptide
DKGVVTYQYNKLYTVVGKDLYLISIAS

SEQ ID NO: 122906 - protein, 27 aa, Artificial Sequence
  Cyclic GFR-binding peptide
DKGVVTYQYNKLVVKDYEDLYLMSIAS

SEQ ID NO: 122907 - protein, 27 aa, Artificial Sequence
  Cyclic GFR-binding peptide
DKGVVTYRYKKLVVNNASDFYLISIAN

SEQ ID NO: 122908 - protein, 27 aa, Artificial Sequence
  Cyclic GFR-binding peptide
DKGVVTYQYNKLIVNSSDDLYLVSIAS

SEQ ID NO: 122909 - protein, 27 aa, Artificial Sequence
  Cyclic GFR-binding peptide
NAISILYFIGKTPKILKKYRDKGVVTY

SEQ ID NO: 122910 - protein, 27 aa, Artificial Sequence
  Cyclic GFR-binding peptide
SAISILYLDENKNVVLKNYQDKGVVTY

SEQ ID NO: 122911 - protein, 27 aa, Artificial Sequence
  Cyclic GFR-binding peptide
SAISILYLDAANNVVLKNYQDKGVVTY

SEQ ID NO: 122912 - protein, 27 aa, Artificial Sequence
  Cyclic GFR-binding peptide
SAISVLYLDSSNNVILKNYQDKGVVTY

SEQ ID NO: 122913 - protein, 27 aa, Artificial Sequence
  Cyclic GFR-binding peptide
NAISMLYFDEYDKVVLKKYRDKGVVTY

SEQ ID NO: 122914 - protein, 27 aa, Artificial Sequence
  Cyclic GFR-binding peptide
NAISILYFVGRTPKVLKKYRDKGVVTY

SEQ ID NO: 122915 - protein, 27 aa, Artificial Sequence
  Cyclic GFR-binding peptide
SAISMLYLNDKQQIILKNYQDKGVVTY

SEQ ID NO: 122916 - protein, 27 aa, Artificial Sequence
  Cyclic GFR-binding peptide
SAISMLYLDNGRVLLLKNYQDKGVVTY

SEQ ID NO: 122917 - protein, 27 aa, Artificial Sequence
  Cyclic GFR-binding peptide
SAISILYLVGRTPKVLKNYQDKGVVTY

SEQ ID NO: 122918 - protein, 27 aa, Artificial Sequence
  Cyclic GFR-binding peptide
NAISMLYFDENEKVVLKKYRDKGVVTY

SEQ ID NO: 122919 - protein, 27 aa, Artificial Sequence
  Cyclic GFR-binding peptide
NAISILYFDAANNVVLKKYRDKGVVTY

SEQ ID NO: 122920 - protein, 27 aa, Artificial Sequence
  Cyclic GFR-binding peptide
SAISVLYLDDMGVPTLKNYQDKGVVTY

SEQ ID NO: 122921 - protein, 27 aa, Artificial Sequence
  Cyclic GFR-binding peptide
NAISVLYFDDMGVPTLKKYRDKGVVTY

SEQ ID NO: 122922 - protein, 27 aa, Artificial Sequence
  Cyclic GFR-binding peptide
NAISILYFVGRKPKVLKKYRDKGVVTY

SEQ ID NO: 122923 - protein, 27 aa, Artificial Sequence
  Cyclic GFR-binding peptide
SAISMLYLDENEKVVLKNYQDKGVVTY

SEQ ID NO: 122924 - protein, 27 aa, Artificial Sequence
  Cyclic GFR-binding peptide
NAISMLYFNDKQQIILKKYRDKGVVTY

SEQ ID NO: 122925 - protein, 27 aa, Artificial Sequence
  Cyclic GFR-binding peptide
SAISILYLVGRKPKVLKNYQDKGVVTY

SEQ ID NO: 122926 - protein, 27 aa, Artificial Sequence
  Cyclic GFR-binding peptide
NAISVLYFDSSNNVILKKYRDKGVVTY

SEQ ID NO: 122927 - protein, 27 aa, Artificial Sequence
  Cyclic GFR-binding peptide
NAISILYFDKGVVTYLKKYRDKGVVTY

SEQ ID NO: 122928 - protein, 27 aa, Artificial Sequence
  Cyclic GFR-binding peptide
NAISVLYFDDSSNVILKKYRDKGVVTY

SEQ ID NO: 122929 - protein, 27 aa, Artificial Sequence
  Cyclic GFR-binding peptide
NAISMLYFDNGRVLLLKKYRDKGVVTY

SEQ ID NO: 122930 - protein, 27 aa, Artificial Sequence
  Cyclic GFR-binding peptide
SAISILYLDSANNVVLKNYQDKGVVTY

SEQ ID NO: 122931 - protein, 27 aa, Artificial Sequence
  Cyclic GFR-binding peptide
SAISILYLIGKTPKILKNYQDKGVVTY

SEQ ID NO: 122932 - protein, 27 aa, Artificial Sequence
  Cyclic GFR-binding peptide
NAISILYFDENKNVVLKKYRDKGVVTY

SEQ ID NO: 122933 - protein, 27 aa, Artificial Sequence
  Cyclic GFR-binding peptide
SAISILYLDKGVVTYLKNYQDKGVVTY

SEQ ID NO: 122934 - protein, 27 aa, Artificial Sequence
  Cyclic GFR-binding peptide
SAISMLYLDEYDKVVLKNYQDKGVVTY

SEQ ID NO: 122935 - protein, 27 aa, Artificial Sequence
  Cyclic GFR-binding peptide
NAISILYFDSANNVVLKKYRDKGVVTY

SEQ ID NO: 122936 - protein, 27 aa, Artificial Sequence
  Cyclic GFR-binding peptide
SAISVLYLDDSSNVILKNYQDKGVVTY

SEQ ID NO: 122937 - protein, 29 aa, Artificial Sequence
  Cyclic GFR-binding peptide
DKGVVTYVTAKKLKPKKRVYEIKRVQVPR

SEQ ID NO: 122938 - protein, 29 aa, Artificial Sequence
  Cyclic GFR-binding peptide
DKGVVTYVQVEKLKPKKRVYEVKAVKVSR

SEQ ID NO: 122939 - protein, 27 aa, Artificial Sequence
  Cyclic GFR-binding peptide
DKGVVTYVTAKKVKPTRGVIKRIQVPR

SEQ ID NO: 122940 - protein, 29 aa, Artificial Sequence
  Cyclic GFR-binding peptide
DKGVVTYVQVEKFIPKKRVIEVKAVKVSR

SEQ ID NO: 122941 - protein, 29 aa, Artificial Sequence
  Cyclic GFR-binding peptide
DKGVVTYVQVEKHQGQHPKIRVKAMKVSR

SEQ ID NO: 122942 - protein, 29 aa, Artificial Sequence
  Cyclic GFR-binding peptide
DKGVVTYVTAKKHQGQHPKIRIKRMQVPR

SEQ ID NO: 122943 - protein, 27 aa, Artificial Sequence
  Cyclic GFR-binding peptide
DKGVVTYVTAKKIKPTKGIIKRIQVPR

SEQ ID NO: 122944 - protein, 27 aa, Artificial Sequence
  Cyclic GFR-binding peptide
DKGVVTYVQVEKVKPKRGVVKAIKVSR

SEQ ID NO: 122945 - protein, 27 aa, Artificial Sequence
  Cyclic GFR-binding peptide
DKGVVTYVTAKKVKPKRGVIKRIQVPR

SEQ ID NO: 122946 - protein, 27 aa, Artificial Sequence
  Cyclic GFR-binding peptide
DKGVVTYVQVEKIKPTKGIVKAIKVSR

SEQ ID NO: 122947 - protein, 27 aa, Artificial Sequence
  Cyclic GFR-binding peptide
DKGVVTYVQVEKVKPTRGVVKAIKVSR

SEQ ID NO: 122948 - protein, 29 aa, Artificial Sequence
  Cyclic GFR-binding peptide
DKGVVTYVTAKKFIPKKRVIEIKRVQVPR

SEQ ID NO: 122949 - protein, 29 aa, Artificial Sequence
  Cyclic GFR-binding peptide
RPVQVRKIEYVRKKPKLKKATVDKGVVTY

SEQ ID NO: 122950 - protein, 29 aa, Artificial Sequence
  Cyclic GFR-binding peptide
RSVKVAKVEYVRKKPKLKEVQVDKGVVTY

SEQ ID NO: 122951 - protein, 27 aa, Artificial Sequence
  Cyclic GFR-binding peptide
RPVQIRKIVGRTPKVKKATVDKGVVTY

SEQ ID NO: 122952 - protein, 29 aa, Artificial Sequence
  Cyclic GFR-binding peptide
RSVKVAKVEIVRKKPIFKEVQVDKGVVTY

SEQ ID NO: 122953 - protein, 29 aa, Artificial Sequence
  Cyclic GFR-binding peptide
RSVKMAKVRIKPHQGQHKEVQVDKGVVTY

SEQ ID NO: 122954 - protein, 29 aa, Artificial Sequence
  Cyclic GFR-binding peptide
RPVQMRKIRIKPHQGQHKKATVDKGVVTY

SEQ ID NO: 122955 - protein, 27 aa, Artificial Sequence
  Cyclic GFR-binding peptide
RPVQIRKIIGKTPKIKKATVDKGVVTY

SEQ ID NO: 122956 - protein, 27 aa, Artificial Sequence
  Cyclic GFR-binding peptide
RSVKIAKVVGRKPKVKEVQVDKGVVTY

SEQ ID NO: 122957 - protein, 27 aa, Artificial Sequence
  Cyclic GFR-binding peptide
RPVQIRKIVGRKPKVKKATVDKGVVTY

SEQ ID NO: 122958 - protein, 27 aa, Artificial Sequence
  Cyclic GFR-binding peptide
RSVKIAKVIGKTPKIKEVQVDKGVVTY

SEQ ID NO: 122959 - protein, 27 aa, Artificial Sequence
  Cyclic GFR-binding peptide
RSVKIAKVVGRTPKVKEVQVDKGVVTY

SEQ ID NO: 122960 - protein, 29 aa, Artificial Sequence
  Cyclic GFR-binding peptide
RPVQVRKIEIVRKKPIFKKATVDKGVVTY

SEQ ID NO: 122961 - protein, 27 aa, Artificial Sequence
  Cyclic GFR-binding peptide
NDKQQIIRYKKLIKPTKGIFYLISIAN

SEQ ID NO: 122962 - protein, 29 aa, Artificial Sequence
  Cyclic GFR-binding peptide
NDKQQIIRHKRLFIPKKRVIEYYLVSTAS

SEQ ID NO: 122963 - protein, 27 aa, Artificial Sequence
  Cyclic GFR-binding peptide
NDKQQIIYHYKLVVKDYEDKYLMSIPS

SEQ ID NO: 122964 - protein, 27 aa, Artificial Sequence
  Cyclic GFR-binding peptide
NDKQQIIQYNKLIVNNSSDLYLVSIAS

SEQ ID NO: 122965 - protein, 27 aa, Artificial Sequence
  Cyclic GFR-binding peptide
NDKQQIIRYKKLVVKDYEDFYLMSIAN

SEQ ID NO: 122966 - protein, 27 aa, Artificial Sequence
  Cyclic GFR-binding peptide
NDKQQIIRYKKLVKPTRGVFYLISIAN

SEQ ID NO: 122967 - protein, 27 aa, Artificial Sequence
  Cyclic GFR-binding peptide
NDKQQIIRHKRLVVKENEDYYLMSTAS

SEQ ID NO: 122968 - protein, 27 aa, Artificial Sequence
  Cyclic GFR-binding peptide
NDKQQIIYHYKLIKPTKGIKYLISIPS

SEQ ID NO: 122969 - protein, 29 aa, Artificial Sequence
  Cyclic GFR-binding peptide
NDKQQIIRYKKLFIPKKRVIEFYLVSIAN

SEQ ID NO: 122970 - protein, 27 aa, Artificial Sequence
  Cyclic GFR-binding peptide
NDKQQIIYHYKLVVKENEDKYLMSIPS

SEQ ID NO: 122971 - protein, 27 aa, Artificial Sequence
  Cyclic GFR-binding peptide
NDKQQIIRHKRLVKPKRGVYYLISTAS

SEQ ID NO: 122972 - protein, 27 aa, Artificial Sequence
  Cyclic GFR-binding peptide
NDKQQIIYHYKLVKPKRGVKYLISIPS

SEQ ID NO: 122973 - protein, 29 aa, Artificial Sequence
  Cyclic GFR-binding peptide
NDKQQIIQYNKLFIPKKRVIELYLVSIAS

SEQ ID NO: 122974 - protein, 27 aa, Artificial Sequence
  Cyclic GFR-binding peptide
NDKQQIIQYNKLVKPTRGVLYLISIAS

SEQ ID NO: 122975 - protein, 27 aa, Artificial Sequence
  Cyclic GFR-binding peptide
NDKQQIIRYKKLVVKENEDFYLMSIAN

SEQ ID NO: 122976 - protein, 27 aa, Artificial Sequence
  Cyclic GFR-binding peptide
NDKQQIIQYNKLTPVGMDDLYLVSIAS

SEQ ID NO: 122977 - protein, 27 aa, Artificial Sequence
  Cyclic GFR-binding peptide
NDKQQIIRYKKLTPVGMDDFYLVSIAN

SEQ ID NO: 122978 - protein, 27 aa, Artificial Sequence
  Cyclic GFR-binding peptide
NDKQQIIRYKKLVKPKRGVFYLISIAN

SEQ ID NO: 122979 - protein, 27 aa, Artificial Sequence
  Cyclic GFR-binding peptide
NDKQQIIQYNKLVVKENEDLYLMSIAS

SEQ ID NO: 122980 - protein, 27 aa, Artificial Sequence
  Cyclic GFR-binding peptide
NDKQQIIYHYKLIVNSSDDKYLVSIPS

SEQ ID NO: 122981 - protein, 27 aa, Artificial Sequence
  Cyclic GFR-binding peptide
NDKQQIIQYNKLVKPKRGVLYLISIAS

SEQ ID NO: 122982 - protein, 27 aa, Artificial Sequence
  Cyclic GFR-binding peptide
NDKQQIIRYKKLIVNNSSDFYLVSIAN

SEQ ID NO: 122983 - protein, 27 aa, Artificial Sequence
  Cyclic GFR-binding peptide
NDKQQIIRYKKLIVNSSDDFYLVSIAN

SEQ ID NO: 122984 - protein, 27 aa, Artificial Sequence
  Cyclic GFR-binding peptide
NDKQQIIRHKRLVKPTRGVYYLISTAS

SEQ ID NO: 122985 - protein, 29 aa, Artificial Sequence
  Cyclic GFR-binding peptide
NDKQQIIYHYKLFIPKKRVIEKYLVSIPS

SEQ ID NO: 122986 - protein, 27 aa, Artificial Sequence
  Cyclic GFR-binding peptide
NDKQQIIRHKRLIKPTKGIYYLISTAS

SEQ ID NO: 122987 - protein, 27 aa, Artificial Sequence
  Cyclic GFR-binding peptide
NDKQQIIRHKRLTPVGMDDYYLVSTAS

SEQ ID NO: 122988 - protein, 27 aa, Artificial Sequence
  Cyclic GFR-binding peptide
NDKQQIIYHYKLTPVGMDDKYLVSIPS

SEQ ID NO: 122989 - protein, 27 aa, Artificial Sequence
  Cyclic GFR-binding peptide
NDKQQIIYHYKLIVNNSSDKYLVSIPS

SEQ ID NO: 122990 - protein, 27 aa, Artificial Sequence
  Cyclic GFR-binding peptide
NDKQQIIRHKRLIVNNSSDYYLVSTAS

SEQ ID NO: 122991 - protein, 27 aa, Artificial Sequence
  Cyclic GFR-binding peptide
NDKQQIIYHYKLVKPTRGVKYLISIPS

SEQ ID NO: 122992 - protein, 27 aa, Artificial Sequence
  Cyclic GFR-binding peptide
NDKQQIIRHKRLIVNSSDDYYLVSTAS

SEQ ID NO: 122993 - protein, 27 aa, Artificial Sequence
  Cyclic GFR-binding peptide
NDKQQIIRHKRLVVKDYEDYYLMSTAS

SEQ ID NO: 122994 - protein, 27 aa, Artificial Sequence
  Cyclic GFR-binding peptide
NDKQQIIQYNKLIKPTKGILYLISIAS

SEQ ID NO: 122995 - protein, 27 aa, Artificial Sequence
  Cyclic GFR-binding peptide
NDKQQIIQYNKLVVKDYEDLYLMSIAS

SEQ ID NO: 122996 - protein, 27 aa, Artificial Sequence
  Cyclic GFR-binding peptide
NDKQQIIQYNKLIVNSSDDLYLVSIAS

SEQ ID NO: 122997 - protein, 27 aa, Artificial Sequence
  Cyclic GFR-binding peptide
NAISILYFIGKTPKILKKYRNDKQQII

SEQ ID NO: 122998 - protein, 29 aa, Artificial Sequence
  Cyclic GFR-binding peptide
SATSVLYYEIVRKKPIFLRKHRNDKQQII

SEQ ID NO: 122999 - protein, 27 aa, Artificial Sequence
  Cyclic GFR-binding peptide
SPISMLYKDEYDKVVLKYHYNDKQQII

SEQ ID NO: 123000 - protein, 27 aa, Artificial Sequence
  Cyclic GFR-binding peptide
SAISVLYLDSSNNVILKNYQNDKQQII

SEQ ID NO: 123001 - protein, 27 aa, Artificial Sequence
  Cyclic GFR-binding peptide
NAISMLYFDEYDKVVLKKYRNDKQQII

SEQ ID NO: 123002 - protein, 27 aa, Artificial Sequence
  Cyclic GFR-binding peptide
NAISILYFVGRTPKVLKKYRNDKQQII

SEQ ID NO: 123003 - protein, 27 aa, Artificial Sequence
  Cyclic GFR-binding peptide
SATSMLYYDENEKVVLRKHRNDKQQII

SEQ ID NO: 123004 - protein, 27 aa, Artificial Sequence
  Cyclic GFR-binding peptide
SPISILYKIGKTPKILKYHYNDKQQII

SEQ ID NO: 123005 - protein, 29 aa, Artificial Sequence
  Cyclic GFR-binding peptide
NAISVLYFEIVRKKPIFLKKYRNDKQQII

SEQ ID NO: 123006 - protein, 27 aa, Artificial Sequence
  Cyclic GFR-binding peptide
SPISMLYKDENEKVVLKYHYNDKQQII

SEQ ID NO: 123007 - protein, 27 aa, Artificial Sequence
  Cyclic GFR-binding peptide
SATSILYYVGRKPKVLRKHRNDKQQII

SEQ ID NO: 123008 - protein, 27 aa, Artificial Sequence
  Cyclic GFR-binding peptide
SPISILYKVGRKPKVLKYHYNDKQQII

SEQ ID NO: 123009 - protein, 29 aa, Artificial Sequence
  Cyclic GFR-binding peptide
SAISVLYLEIVRKKPIFLKNYQNDKQQII

SEQ ID NO: 123010 - protein, 27 aa, Artificial Sequence
  Cyclic GFR-binding peptide
SAISILYLVGRTPKVLKNYQNDKQQII

SEQ ID NO: 123011 - protein, 27 aa, Artificial Sequence
  Cyclic GFR-binding peptide
NAISMLYFDENEKVVLKKYRNDKQQII

SEQ ID NO: 123012 - protein, 27 aa, Artificial Sequence
  Cyclic GFR-binding peptide
SAISVLYLDDMGVPTLKNYQNDKQQII

SEQ ID NO: 123013 - protein, 27 aa, Artificial Sequence
  Cyclic GFR-binding peptide
NAISVLYFDDMGVPTLKKYRNDKQQII

SEQ ID NO: 123014 - protein, 27 aa, Artificial Sequence
  Cyclic GFR-binding peptide
NAISILYFVGRKPKVLKKYRNDKQQII

SEQ ID NO: 123015 - protein, 27 aa, Artificial Sequence
  Cyclic GFR-binding peptide
SAISMLYLDENEKVVLKNYQNDKQQII

SEQ ID NO: 123016 - protein, 27 aa, Artificial Sequence
  Cyclic GFR-binding peptide
SPISVLYKDDSSNVILKYHYNDKQQII

SEQ ID NO: 123017 - protein, 27 aa, Artificial Sequence
  Cyclic GFR-binding peptide
SAISILYLVGRKPKVLKNYQNDKQQII

SEQ ID NO: 123018 - protein, 27 aa, Artificial Sequence
  Cyclic GFR-binding peptide
NAISVLYFDSSNNVILKKYRNDKQQII

SEQ ID NO: 123019 - protein, 27 aa, Artificial Sequence
  Cyclic GFR-binding peptide
NAISVLYFDDSSNVILKKYRNDKQQII

SEQ ID NO: 123020 - protein, 27 aa, Artificial Sequence
  Cyclic GFR-binding peptide
SATSILYYVGRTPKVLRKHRNDKQQII

SEQ ID NO: 123021 - protein, 29 aa, Artificial Sequence
  Cyclic GFR-binding peptide
SPISVLYKEIVRKKPIFLKYHYNDKQQII

SEQ ID NO: 123022 - protein, 27 aa, Artificial Sequence
  Cyclic GFR-binding peptide
SATSILYYIGKTPKILRKHRNDKQQII

SEQ ID NO: 123023 - protein, 27 aa, Artificial Sequence
  Cyclic GFR-binding peptide
SATSVLYYDDMGVPTLRKHRNDKQQII

SEQ ID NO: 123024 - protein, 27 aa, Artificial Sequence
  Cyclic GFR-binding peptide
SPISVLYKDDMGVPTLKYHYNDKQQII

SEQ ID NO: 123025 - protein, 27 aa, Artificial Sequence
  Cyclic GFR-binding peptide
SPISVLYKDSSNNVILKYHYNDKQQII

SEQ ID NO: 123026 - protein, 27 aa, Artificial Sequence
  Cyclic GFR-binding peptide
SATSVLYYDSSNNVILRKHRNDKQQII

SEQ ID NO: 123027 - protein, 27 aa, Artificial Sequence
  Cyclic GFR-binding peptide
SPISILYKVGRTPKVLKYHYNDKQQII

SEQ ID NO: 123028 - protein, 27 aa, Artificial Sequence
  Cyclic GFR-binding peptide
SATSVLYYDDSSNVILRKHRNDKQQII

SEQ ID NO: 123029 - protein, 27 aa, Artificial Sequence
  Cyclic GFR-binding peptide
SATSMLYYDEYDKVVLRKHRNDKQQII

SEQ ID NO: 123030 - protein, 27 aa, Artificial Sequence
  Cyclic GFR-binding peptide
SAISILYLIGKTPKILKNYQNDKQQII

SEQ ID NO: 123031 - protein, 27 aa, Artificial Sequence
  Cyclic GFR-binding peptide
SAISMLYLDEYDKVVLKNYQNDKQQII

SEQ ID NO: 123032 - protein, 27 aa, Artificial Sequence
  Cyclic GFR-binding peptide
SAISVLYLDDSSNVILKNYQNDKQQII

SEQ ID NO: 123033 - protein, 27 aa, Artificial Sequence
  Cyclic GFR-binding peptide
NDKQQIIRYKKLIKPTKGIFYLISIAN

SEQ ID NO: 123034 - protein, 27 aa, Artificial Sequence
  Cyclic GFR-binding peptide
NDKQQIINSLQEVVKDYEDYYLMTLPE

SEQ ID NO: 123035 - protein, 27 aa, Artificial Sequence
  Cyclic GFR-binding peptide
NDKQQIINSLQEIKPTKGIYYVIPLPE

SEQ ID NO: 123036 - protein, 27 aa, Artificial Sequence
  Cyclic GFR-binding peptide
NDKQQIINSLQEVKPKRGVYYLITLPE

SEQ ID NO: 123037 - protein, 27 aa, Artificial Sequence
  Cyclic GFR-binding peptide
NDKQQIINSLQEVKPTRGVYYVIPLPE

SEQ ID NO: 123038 - protein, 27 aa, Artificial Sequence
  Cyclic GFR-binding peptide
NDKQQIIRYKKLVVKDYEDFYLMSIAN

SEQ ID NO: 123039 - protein, 27 aa, Artificial Sequence
  Cyclic GFR-binding peptide
NDKQQIIEYQKYIVNSSDDIFLVSIPS

SEQ ID NO: 123040 - protein, 27 aa, Artificial Sequence
  Cyclic GFR-binding peptide
NDKQQIIEYQKYVKPTRGVIFLISIPS

SEQ ID NO: 123041 - protein, 27 aa, Artificial Sequence
  Cyclic GFR-binding peptide
NDKQQIINSLQEVVKENEDYYLMTLPE

SEQ ID NO: 123042 - protein, 27 aa, Artificial Sequence
  Cyclic GFR-binding peptide
NDKQQIIRYKKLVKPTRGVFYLISIAN

SEQ ID NO: 123043 - protein, 27 aa, Artificial Sequence
  Cyclic GFR-binding peptide
NDKQQIINSLQEVVNNASDYYLITLPE

SEQ ID NO: 123044 - protein, 27 aa, Artificial Sequence
  Cyclic GFR-binding peptide
NDKQQIINSLQEVKPKRGVYYVIPLPE

SEQ ID NO: 123045 - protein, 27 aa, Artificial Sequence
  Cyclic GFR-binding peptide
NDKQQIINSLQEVVNNASDYYVIPLPE

SEQ ID NO: 123046 - protein, 27 aa, Artificial Sequence
  Cyclic GFR-binding peptide
NDKQQIINSLQEVKPTRGVYYLITLPE

SEQ ID NO: 123047 - protein, 27 aa, Artificial Sequence
  Cyclic GFR-binding peptide
NDKQQIIQYNKLVKPTRGVLYLISIAS

SEQ ID NO: 123048 - protein, 27 aa, Artificial Sequence
  Cyclic GFR-binding peptide
NDKQQIIRYKKLVVKENEDFYLMSIAN

SEQ ID NO: 123049 - protein, 27 aa, Artificial Sequence
  Cyclic GFR-binding peptide
NDKQQIIEYQKYIKPTKGIIFLISIPS

SEQ ID NO: 123050 - protein, 27 aa, Artificial Sequence
  Cyclic GFR-binding peptide
NDKQQIIEYQKYVVNNASDIFLISIPS

SEQ ID NO: 123051 - protein, 27 aa, Artificial Sequence
  Cyclic GFR-binding peptide
NDKQQIIRYKKLVKPKRGVFYLISIAN

SEQ ID NO: 123052 - protein, 27 aa, Artificial Sequence
  Cyclic GFR-binding peptide
NDKQQIINSLQEIVNSSDDYYVVPLPE

SEQ ID NO: 123053 - protein, 27 aa, Artificial Sequence
  Cyclic GFR-binding peptide
NDKQQIINSLQEVVKDYEDYYVMPLPE

SEQ ID NO: 123054 - protein, 27 aa, Artificial Sequence
  Cyclic GFR-binding peptide
NDKQQIIQYNKLVVKENEDLYLMSIAS

SEQ ID NO: 123055 - protein, 27 aa, Artificial Sequence
  Cyclic GFR-binding peptide
NDKQQIIEYQKYVVKENEDIFLMSIPS

SEQ ID NO: 123056 - protein, 27 aa, Artificial Sequence
  Cyclic GFR-binding peptide
NDKQQIIQYNKLVKPKRGVLYLISIAS

SEQ ID NO: 123057 - protein, 27 aa, Artificial Sequence
  Cyclic GFR-binding peptide
NDKQQIIRYKKLIVNSSDDFYLVSIAN

SEQ ID NO: 123058 - protein, 27 aa, Artificial Sequence
  Cyclic GFR-binding peptide
NDKQQIINSLQEVVKENEDYYVMPLPE

SEQ ID NO: 123059 - protein, 27 aa, Artificial Sequence
  Cyclic GFR-binding peptide
NDKQQIIEYQKYVVKDYEDIFLMSIPS

SEQ ID NO: 123060 - protein, 27 aa, Artificial Sequence
  Cyclic GFR-binding peptide
NDKQQIIQYNKLVVNNASDLYLISIAS

SEQ ID NO: 123061 - protein, 27 aa, Artificial Sequence
  Cyclic GFR-binding peptide
NDKQQIIQYNKLIKPTKGILYLISIAS

SEQ ID NO: 123062 - protein, 27 aa, Artificial Sequence
  Cyclic GFR-binding peptide
NDKQQIINSLQEIKPTKGIYYLITLPE

SEQ ID NO: 123063 - protein, 27 aa, Artificial Sequence
  Cyclic GFR-binding peptide
NDKQQIIEYQKYVKPKRGVIFLISIPS

SEQ ID NO: 123064 - protein, 27 aa, Artificial Sequence
  Cyclic GFR-binding peptide
NDKQQIIQYNKLVVKDYEDLYLMSIAS

SEQ ID NO: 123065 - protein, 27 aa, Artificial Sequence
  Cyclic GFR-binding peptide
NDKQQIIRYKKLVVNNASDFYLISIAN

SEQ ID NO: 123066 - protein, 27 aa, Artificial Sequence
  Cyclic GFR-binding peptide
NDKQQIINSLQEIVNSSDDYYLVTLPE

SEQ ID NO: 123067 - protein, 27 aa, Artificial Sequence
  Cyclic GFR-binding peptide
NDKQQIIQYNKLIVNSSDDLYLVSIAS

SEQ ID NO: 123068 - protein, 27 aa, Artificial Sequence
  Cyclic GFR-binding peptide
NAISILYFIGKTPKILKKYRNDKQQII

SEQ ID NO: 123069 - protein, 27 aa, Artificial Sequence
  Cyclic GFR-binding peptide
EPLTMLYYDEYDKVVEQLSNNDKQQII

SEQ ID NO: 123070 - protein, 27 aa, Artificial Sequence
  Cyclic GFR-binding peptide
EPLPIVYYIGKTPKIEQLSNNDKQQII

SEQ ID NO: 123071 - protein, 27 aa, Artificial Sequence
  Cyclic GFR-binding peptide
EPLTILYYVGRKPKVEQLSNNDKQQII

SEQ ID NO: 123072 - protein, 27 aa, Artificial Sequence
  Cyclic GFR-binding peptide
EPLPIVYYVGRTPKVEQLSNNDKQQII

SEQ ID NO: 123073 - protein, 27 aa, Artificial Sequence
  Cyclic GFR-binding peptide
NAISMLYFDEYDKVVLKKYRNDKQQII

SEQ ID NO: 123074 - protein, 27 aa, Artificial Sequence
  Cyclic GFR-binding peptide
SPISVLFIDDSSNVIYKQYENDKQQII

SEQ ID NO: 123075 - protein, 27 aa, Artificial Sequence
  Cyclic GFR-binding peptide
SPISILFIVGRTPKVYKQYENDKQQII

SEQ ID NO: 123076 - protein, 27 aa, Artificial Sequence
  Cyclic GFR-binding peptide
EPLTMLYYDENEKVVEQLSNNDKQQII

SEQ ID NO: 123077 - protein, 27 aa, Artificial Sequence
  Cyclic GFR-binding peptide
NAISILYFVGRTPKVLKKYRNDKQQII

SEQ ID NO: 123078 - protein, 27 aa, Artificial Sequence
  Cyclic GFR-binding peptide
EPLTILYYDSANNVVEQLSNNDKQQII

SEQ ID NO: 123079 - protein, 27 aa, Artificial Sequence
  Cyclic GFR-binding peptide
EPLPIVYYVGRKPKVEQLSNNDKQQII

SEQ ID NO: 123080 - protein, 27 aa, Artificial Sequence
  Cyclic GFR-binding peptide
EPLPIVYYDSANNVVEQLSNNDKQQII

SEQ ID NO: 123081 - protein, 27 aa, Artificial Sequence
  Cyclic GFR-binding peptide
EPLTILYYVGRTPKVEQLSNNDKQQII

SEQ ID NO: 123082 - protein, 27 aa, Artificial Sequence
  Cyclic GFR-binding peptide
SAISILYLVGRTPKVLKNYQNDKQQII

SEQ ID NO: 123083 - protein, 27 aa, Artificial Sequence
  Cyclic GFR-binding peptide
NAISMLYFDENEKVVLKKYRNDKQQII

SEQ ID NO: 123084 - protein, 27 aa, Artificial Sequence
  Cyclic GFR-binding peptide
SPISILFIIGKTPKIYKQYENDKQQII

SEQ ID NO: 123085 - protein, 27 aa, Artificial Sequence
  Cyclic GFR-binding peptide
SPISILFIDSANNVVYKQYENDKQQII

SEQ ID NO: 123086 - protein, 27 aa, Artificial Sequence
  Cyclic GFR-binding peptide
NAISILYFVGRKPKVLKKYRNDKQQII

SEQ ID NO: 123087 - protein, 27 aa, Artificial Sequence
  Cyclic GFR-binding peptide
EPLPVVYYDDSSNVIEQLSNNDKQQII

SEQ ID NO: 123088 - protein, 27 aa, Artificial Sequence
  Cyclic GFR-binding peptide
EPLPMVYYDEYDKVVEQLSNNDKQQII

SEQ ID NO: 123089 - protein, 27 aa, Artificial Sequence
  Cyclic GFR-binding peptide
SAISMLYLDENEKVVLKNYQNDKQQII

SEQ ID NO: 123090 - protein, 27 aa, Artificial Sequence
  Cyclic GFR-binding peptide
SPISMLFIDENEKVVYKQYENDKQQII

SEQ ID NO: 123091 - protein, 27 aa, Artificial Sequence
  Cyclic GFR-binding peptide
SAISILYLVGRKPKVLKNYQNDKQQII

SEQ ID NO: 123092 - protein, 27 aa, Artificial Sequence
  Cyclic GFR-binding peptide
NAISVLYFDDSSNVILKKYRNDKQQII

SEQ ID NO: 123093 - protein, 27 aa, Artificial Sequence
  Cyclic GFR-binding peptide
EPLPMVYYDENEKVVEQLSNNDKQQII

SEQ ID NO: 123094 - protein, 27 aa, Artificial Sequence
  Cyclic GFR-binding peptide
SPISMLFIDEYDKVVYKQYENDKQQII

SEQ ID NO: 123095 - protein, 27 aa, Artificial Sequence
  Cyclic GFR-binding peptide
SAISILYLDSANNVVLKNYQNDKQQII

SEQ ID NO: 123096 - protein, 27 aa, Artificial Sequence
  Cyclic GFR-binding peptide
SAISILYLIGKTPKILKNYQNDKQQII

SEQ ID NO: 123097 - protein, 27 aa, Artificial Sequence
  Cyclic GFR-binding peptide
EPLTILYYIGKTPKIEQLSNNDKQQII

SEQ ID NO: 123098 - protein, 27 aa, Artificial Sequence
  Cyclic GFR-binding peptide
SPISILFIVGRKPKVYKQYENDKQQII

SEQ ID NO: 123099 - protein, 27 aa, Artificial Sequence
  Cyclic GFR-binding peptide
SAISMLYLDEYDKVVLKNYQNDKQQII

SEQ ID NO: 123100 - protein, 27 aa, Artificial Sequence
  Cyclic GFR-binding peptide
NAISILYFDSANNVVLKKYRNDKQQII

SEQ ID NO: 123101 - protein, 27 aa, Artificial Sequence
  Cyclic GFR-binding peptide
EPLTVLYYDDSSNVIEQLSNNDKQQII

SEQ ID NO: 123102 - protein, 27 aa, Artificial Sequence
  Cyclic GFR-binding peptide
SAISVLYLDDSSNVILKNYQNDKQQII

SEQ ID NO: 123103 - protein, 29 aa, Artificial Sequence
  Cyclic GFR-binding peptide
NDKQQIIVTAKKLKPKKRVYEIKRVQVPR

SEQ ID NO: 123104 - protein, 29 aa, Artificial Sequence
  Cyclic GFR-binding peptide
NDKQQIIVQVEKLKPKKRVYEVKAVKVSR

SEQ ID NO: 123105 - protein, 29 aa, Artificial Sequence
  Cyclic GFR-binding peptide
NDKQQIIVQVEKFIPKKRVIEVKAVKVSR

SEQ ID NO: 123106 - protein, 29 aa, Artificial Sequence
  Cyclic GFR-binding peptide
NDKQQIIVQVEKHQGQHPKIRVKAMKVSR

SEQ ID NO: 123107 - protein, 29 aa, Artificial Sequence
  Cyclic GFR-binding peptide
NDKQQIIVTAKKHQGQHPKIRIKRMQVPR

SEQ ID NO: 123108 - protein, 29 aa, Artificial Sequence
  Cyclic GFR-binding peptide
NDKQQIISMEGLLKPKKRVYEMIQVTINS

SEQ ID NO: 123109 - protein, 29 aa, Artificial Sequence
  Cyclic GFR-binding peptide
NDKQQIISMEGIFIPKKRVIEMIQVTINS

SEQ ID NO: 123110 - protein, 29 aa, Artificial Sequence
  Cyclic GFR-binding peptide
NDKQQIISMEGLHQGQHPKIRMIQMTINS

SEQ ID NO: 123111 - protein, 29 aa, Artificial Sequence
  Cyclic GFR-binding peptide
NDKQQIISMEGILKPKKRVYEMIQVTINS

SEQ ID NO: 123112 - protein, 29 aa, Artificial Sequence
  Cyclic GFR-binding peptide
NDKQQIISMEGLFIPKKRVIEMIQVTINS

SEQ ID NO: 123113 - protein, 29 aa, Artificial Sequence
  Cyclic GFR-binding peptide
NDKQQIIVTAKKFIPKKRVIEIKRVQVPR

SEQ ID NO: 123114 - protein, 29 aa, Artificial Sequence
  Cyclic GFR-binding peptide
NDKQQIISMEGIHQGQHPKIRMIQMTINS

SEQ ID NO: 123115 - protein, 29 aa, Artificial Sequence
  Cyclic GFR-binding peptide
RPVQVRKIEYVRKKPKLKKATVNDKQQII

SEQ ID NO: 123116 - protein, 29 aa, Artificial Sequence
  Cyclic GFR-binding peptide
RSVKVAKVEYVRKKPKLKEVQVNDKQQII

SEQ ID NO: 123117 - protein, 29 aa, Artificial Sequence
  Cyclic GFR-binding peptide
RSVKVAKVEIVRKKPIFKEVQVNDKQQII

SEQ ID NO: 123118 - protein, 29 aa, Artificial Sequence
  Cyclic GFR-binding peptide
RSVKMAKVRIKPHQGQHKEVQVNDKQQII

SEQ ID NO: 123119 - protein, 29 aa, Artificial Sequence
  Cyclic GFR-binding peptide
RPVQMRKIRIKPHQGQHKKATVNDKQQII

SEQ ID NO: 123120 - protein, 29 aa, Artificial Sequence
  Cyclic GFR-binding peptide
SNITVQIMEYVRKKPKLLGEMSNDKQQII

SEQ ID NO: 123121 - protein, 29 aa, Artificial Sequence
  Cyclic GFR-binding peptide
SNITVQIMEIVRKKPIFIGEMSNDKQQII

SEQ ID NO: 123122 - protein, 29 aa, Artificial Sequence
  Cyclic GFR-binding peptide
SNITMQIMRIKPHQGQHLGEMSNDKQQII

SEQ ID NO: 123123 - protein, 29 aa, Artificial Sequence
  Cyclic GFR-binding peptide
SNITVQIMEYVRKKPKLIGEMSNDKQQII

SEQ ID NO: 123124 - protein, 29 aa, Artificial Sequence
  Cyclic GFR-binding peptide
SNITVQIMEIVRKKPIFLGEMSNDKQQII

SEQ ID NO: 123125 - protein, 29 aa, Artificial Sequence
  Cyclic GFR-binding peptide
RPVQVRKIEIVRKKPIFKKATVNDKQQII

SEQ ID NO: 123126 - protein, 29 aa, Artificial Sequence
  Cyclic GFR-binding peptide
SNITMQIMRIKPHQGQHIGEMSNDKQQII

SEQ ID NO: 123127 - protein, 29 aa, Artificial Sequence
  Cyclic GFR-binding peptide
NDKQQIIVTAKKLKPKKRVYEIKRVQVPR

SEQ ID NO: 123128 - protein, 29 aa, Artificial Sequence
  Cyclic GFR-binding peptide
NDKQQIIVQVEKLKPKKRVYEVKAVKVSR

SEQ ID NO: 123129 - protein, 29 aa, Artificial Sequence
  Cyclic GFR-binding peptide
NDKQQIIVQVEKFIPKKRVIEVKAVKVSR

SEQ ID NO: 123130 - protein, 29 aa, Artificial Sequence
  Cyclic GFR-binding peptide
NDKQQIIVQVEKHQGQHPKIRVKAMKVSR

SEQ ID NO: 123131 - protein, 29 aa, Artificial Sequence
  Cyclic GFR-binding peptide
NDKQQIIVTAKKHQGQHPKIRIKRMQVPR

SEQ ID NO: 123132 - protein, 29 aa, Artificial Sequence
  Cyclic GFR-binding peptide
NDKQQIISMEGLLKPKKRVYEMIQVTINS

SEQ ID NO: 123133 - protein, 29 aa, Artificial Sequence
  Cyclic GFR-binding peptide
NDKQQIISMEGIFIPKKRVIEMIQVTINS

SEQ ID NO: 123134 - protein, 29 aa, Artificial Sequence
  Cyclic GFR-binding peptide
NDKQQIISMEGLHQGQHPKIRMIQMTINS

SEQ ID NO: 123135 - protein, 29 aa, Artificial Sequence
  Cyclic GFR-binding peptide
NDKQQIISMEGILKPKKRVYEMIQVTINS

SEQ ID NO: 123136 - protein, 29 aa, Artificial Sequence
  Cyclic GFR-binding peptide
NDKQQIISMEGLFIPKKRVIEMIQVTINS

SEQ ID NO: 123137 - protein, 29 aa, Artificial Sequence
  Cyclic GFR-binding peptide
NDKQQIIVTAKKFIPKKRVIEIKRVQVPR

SEQ ID NO: 123138 - protein, 29 aa, Artificial Sequence
  Cyclic GFR-binding peptide
NDKQQIISMEGIHQGQHPKIRMIQMTINS

SEQ ID NO: 123139 - protein, 29 aa, Artificial Sequence
  Cyclic GFR-binding peptide
RPVQVRKIEYVRKKPKLKKATVNDKQQII

SEQ ID NO: 123140 - protein, 29 aa, Artificial Sequence
  Cyclic GFR-binding peptide
RSVKVAKVEYVRKKPKLKEVQVNDKQQII

SEQ ID NO: 123141 - protein, 29 aa, Artificial Sequence
  Cyclic GFR-binding peptide
RSVKVAKVEIVRKKPIFKEVQVNDKQQII

SEQ ID NO: 123142 - protein, 29 aa, Artificial Sequence
  Cyclic GFR-binding peptide
RSVKMAKVRIKPHQGQHKEVQVNDKQQII

SEQ ID NO: 123143 - protein, 29 aa, Artificial Sequence
  Cyclic GFR-binding peptide
RPVQMRKIRIKPHQGQHKKATVNDKQQII

SEQ ID NO: 123144 - protein, 29 aa, Artificial Sequence
  Cyclic GFR-binding peptide
SNITVQIMEYVRKKPKLLGEMSNDKQQII

SEQ ID NO: 123145 - protein, 29 aa, Artificial Sequence
  Cyclic GFR-binding peptide
SNITVQIMEIVRKKPIFIGEMSNDKQQII

SEQ ID NO: 123146 - protein, 29 aa, Artificial Sequence
  Cyclic GFR-binding peptide
SNITMQIMRIKPHQGQHLGEMSNDKQQII

SEQ ID NO: 123147 - protein, 29 aa, Artificial Sequence
  Cyclic GFR-binding peptide
SNITVQIMEYVRKKPKLIGEMSNDKQQII

SEQ ID NO: 123148 - protein, 29 aa, Artificial Sequence
  Cyclic GFR-binding peptide
SNITVQIMEIVRKKPIFLGEMSNDKQQII

SEQ ID NO: 123149 - protein, 29 aa, Artificial Sequence
  Cyclic GFR-binding peptide
RPVQVRKIEIVRKKPIFKKATVNDKQQII

SEQ ID NO: 123150 - protein, 29 aa, Artificial Sequence
  Cyclic GFR-binding peptide
SNITMQIMRIKPHQGQHIGEMSNDKQQII

SEQ ID NO: 123151 - protein, 27 aa, Artificial Sequence
  Cyclic GFR-binding peptide
NDKQQIIEYQKYVVKENEDIYLMSIPS

SEQ ID NO: 123152 - protein, 27 aa, Artificial Sequence
  Cyclic GFR-binding peptide
NDKQQIIRYKKLIKPTKGIFYLISIAN

SEQ ID NO: 123153 - protein, 27 aa, Artificial Sequence
  Cyclic GFR-binding peptide
NDKQQIIEYKFKVKPTRGVLYLISIPE

SEQ ID NO: 123154 - protein, 27 aa, Artificial Sequence
  Cyclic GFR-binding peptide
NDKQQIIYHYKLVVKDYEDKYLMSIPS

SEQ ID NO: 123155 - protein, 27 aa, Artificial Sequence
  Cyclic GFR-binding peptide
NDKQQIIEYKFKTPVGMDDLYLVSIPE

SEQ ID NO: 123156 - protein, 27 aa, Artificial Sequence
  Cyclic GFR-binding peptide
NDKQQIIEYQKYVKPKRGVIYLISIPS

SEQ ID NO: 123157 - protein, 27 aa, Artificial Sequence
  Cyclic GFR-binding peptide
NDKQQIIRYKKLVVKDYEDFYLMSIAN

SEQ ID NO: 123158 - protein, 27 aa, Artificial Sequence
  Cyclic GFR-binding peptide
NDKQQIIEYQKYVVKDYEDIYLMSIPS

SEQ ID NO: 123159 - protein, 27 aa, Artificial Sequence
  Cyclic GFR-binding peptide
NDKQQIIRYKKLVKPTRGVFYLISIAN

SEQ ID NO: 123160 - protein, 27 aa, Artificial Sequence
  Cyclic GFR-binding peptide
NDKQQIIYHYKLIKPTKGIKYLISIPS

SEQ ID NO: 123161 - protein, 27 aa, Artificial Sequence
  Cyclic GFR-binding peptide
NDKQQIIYHYKLVVKENEDKYLMSIPS

SEQ ID NO: 123162 - protein, 27 aa, Artificial Sequence
  Cyclic GFR-binding peptide
NDKQQIIYHYKLVKPKRGVKYLISIPS

SEQ ID NO: 123163 - protein, 27 aa, Artificial Sequence
  Cyclic GFR-binding peptide
NDKQQIIEYKFKIKPTKGILYLISIPE

SEQ ID NO: 123164 - protein, 27 aa, Artificial Sequence
  Cyclic GFR-binding peptide
NDKQQIIEYQKYIKPTKGIIYLISIPS

SEQ ID NO: 123165 - protein, 27 aa, Artificial Sequence
  Cyclic GFR-binding peptide
NDKQQIIRYKKLVVKENEDFYLMSIAN

SEQ ID NO: 123166 - protein, 27 aa, Artificial Sequence
  Cyclic GFR-binding peptide
NDKQQIIRYKKLVVNNAADFYLISIAN

SEQ ID NO: 123167 - protein, 27 aa, Artificial Sequence
  Cyclic GFR-binding peptide
NDKQQIIYHYKLYTVVGKDKYLISIPS

SEQ ID NO: 123168 - protein, 27 aa, Artificial Sequence
  Cyclic GFR-binding peptide
NDKQQIIRYKKLTPVGMDDFYLVSIAN

SEQ ID NO: 123169 - protein, 27 aa, Artificial Sequence
  Cyclic GFR-binding peptide
NDKQQIIRYKKLVKPKRGVFYLISIAN

SEQ ID NO: 123170 - protein, 27 aa, Artificial Sequence
  Cyclic GFR-binding peptide
NDKQQIIYHYKLVVNNAADKYLISIPS

SEQ ID NO: 123171 - protein, 27 aa, Artificial Sequence
  Cyclic GFR-binding peptide
NDKQQIIYHYKLIVNSSDDKYLVSIPS

SEQ ID NO: 123172 - protein, 27 aa, Artificial Sequence
  Cyclic GFR-binding peptide
NDKQQIIRYKKLIVNNSSDFYLVSIAN

SEQ ID NO: 123173 - protein, 27 aa, Artificial Sequence
  Cyclic GFR-binding peptide
NDKQQIIRYKKLYTVVGKDFYLISIAN

SEQ ID NO: 123174 - protein, 27 aa, Artificial Sequence
  Cyclic GFR-binding peptide
NDKQQIIEYQKYVVNNAADIYLISIPS

SEQ ID NO: 123175 - protein, 27 aa, Artificial Sequence
  Cyclic GFR-binding peptide
NDKQQIIRYKKLIVNSSDDFYLVSIAN

SEQ ID NO: 123176 - protein, 27 aa, Artificial Sequence
  Cyclic GFR-binding peptide
NDKQQIIEYKFKIVNNSSDLYLVSIPE

SEQ ID NO: 123177 - protein, 27 aa, Artificial Sequence
  Cyclic GFR-binding peptide
NDKQQIIEYQKYVKPTRGVIYLISIPS

SEQ ID NO: 123178 - protein, 27 aa, Artificial Sequence
  Cyclic GFR-binding peptide
NDKQQIIEYQKYIVNSSDDIYLVSIPS

SEQ ID NO: 123179 - protein, 27 aa, Artificial Sequence
  Cyclic GFR-binding peptide
NDKQQIIYHYKLTPVGMDDKYLVSIPS

SEQ ID NO: 123180 - protein, 27 aa, Artificial Sequence
  Cyclic GFR-binding peptide
NDKQQIIYHYKLIVNNSSDKYLVSIPS

SEQ ID NO: 123181 - protein, 27 aa, Artificial Sequence
  Cyclic GFR-binding peptide
NDKQQIIEYKFKIVNSSDDLYLVSIPE

SEQ ID NO: 123182 - protein, 27 aa, Artificial Sequence
  Cyclic GFR-binding peptide
NDKQQIIYHYKLVKPTRGVKYLISIPS

SEQ ID NO: 123183 - protein, 27 aa, Artificial Sequence
  Cyclic GFR-binding peptide
NDKQQIIEYKFKVKPKRGVLYLISIPE

SEQ ID NO: 123184 - protein, 27 aa, Artificial Sequence
  Cyclic GFR-binding peptide
NDKQQIIEYQKYYTVVGKDIYLISIPS

SEQ ID NO: 123185 - protein, 27 aa, Artificial Sequence
  Cyclic GFR-binding peptide
NDKQQIIEYKFKVVKENEDLYLMSIPE

SEQ ID NO: 123186 - protein, 27 aa, Artificial Sequence
  Cyclic GFR-binding peptide
NDKQQIIEYQKYTPVGMDDIYLVSIPS

SEQ ID NO: 123187 - protein, 27 aa, Artificial Sequence
  Cyclic GFR-binding peptide
NDKQQIIEYQKYIVNNSSDIYLVSIPS

SEQ ID NO: 123188 - protein, 27 aa, Artificial Sequence
  Cyclic GFR-binding peptide
NDKQQIIEYKFKVVKDYEDLYLMSIPE

SEQ ID NO: 123189 - protein, 27 aa, Artificial Sequence
  Cyclic GFR-binding peptide
NDKQQIIEYKFKYTVVGKDLYLISIPE

SEQ ID NO: 123190 - protein, 27 aa, Artificial Sequence
  Cyclic GFR-binding peptide
NDKQQIIEYKFKVVNNAADLYLISIPE

SEQ ID NO: 123191 - protein, 27 aa, Artificial Sequence
  Cyclic GFR-binding peptide
SPISMLYIDENEKVVYKQYENDKQQII

SEQ ID NO: 123192 - protein, 27 aa, Artificial Sequence
  Cyclic GFR-binding peptide
NAISILYFIGKTPKILKKYRNDKQQII

SEQ ID NO: 123193 - protein, 27 aa, Artificial Sequence
  Cyclic GFR-binding peptide
EPISILYLVGRTPKVKFKYENDKQQII

SEQ ID NO: 123194 - protein, 27 aa, Artificial Sequence
  Cyclic GFR-binding peptide
SPISMLYKDEYDKVVLKYHYNDKQQII

SEQ ID NO: 123195 - protein, 27 aa, Artificial Sequence
  Cyclic GFR-binding peptide
EPISVLYLDDMGVPTKFKYENDKQQII

SEQ ID NO: 123196 - protein, 27 aa, Artificial Sequence
  Cyclic GFR-binding peptide
SPISILYIVGRKPKVYKQYENDKQQII

SEQ ID NO: 123197 - protein, 27 aa, Artificial Sequence
  Cyclic GFR-binding peptide
NAISMLYFDEYDKVVLKKYRNDKQQII

SEQ ID NO: 123198 - protein, 27 aa, Artificial Sequence
  Cyclic GFR-binding peptide
SPISMLYIDEYDKVVYKQYENDKQQII

SEQ ID NO: 123199 - protein, 27 aa, Artificial Sequence
  Cyclic GFR-binding peptide
NAISILYFVGRTPKVLKKYRNDKQQII

SEQ ID NO: 123200 - protein, 27 aa, Artificial Sequence
  Cyclic GFR-binding peptide
SPISILYKIGKTPKILKYHYNDKQQII

SEQ ID NO: 123201 - protein, 27 aa, Artificial Sequence
  Cyclic GFR-binding peptide
SPISMLYKDENEKVVLKYHYNDKQQII

SEQ ID NO: 123202 - protein, 27 aa, Artificial Sequence
  Cyclic GFR-binding peptide
SPISILYKVGRKPKVLKYHYNDKQQII

SEQ ID NO: 123203 - protein, 27 aa, Artificial Sequence
  Cyclic GFR-binding peptide
EPISILYLIGKTPKIKFKYENDKQQII

SEQ ID NO: 123204 - protein, 27 aa, Artificial Sequence
  Cyclic GFR-binding peptide
SPISILYIIGKTPKIYKQYENDKQQII

SEQ ID NO: 123205 - protein, 27 aa, Artificial Sequence
  Cyclic GFR-binding peptide
NAISMLYFDENEKVVLKKYRNDKQQII

SEQ ID NO: 123206 - protein, 27 aa, Artificial Sequence
  Cyclic GFR-binding peptide
NAISILYFDAANNVVLKKYRNDKQQII

SEQ ID NO: 123207 - protein, 27 aa, Artificial Sequence
  Cyclic GFR-binding peptide
SPISILYKDKGVVTYLKYHYNDKQQII

SEQ ID NO: 123208 - protein, 27 aa, Artificial Sequence
  Cyclic GFR-binding peptide
NAISVLYFDDMGVPTLKKYRNDKQQII

SEQ ID NO: 123209 - protein, 27 aa, Artificial Sequence
  Cyclic GFR-binding peptide
NAISILYFVGRKPKVLKKYRNDKQQII

SEQ ID NO: 123210 - protein, 27 aa, Artificial Sequence
  Cyclic GFR-binding peptide
SPISILYKDAANNVVLKYHYNDKQQII

SEQ ID NO: 123211 - protein, 27 aa, Artificial Sequence
  Cyclic GFR-binding peptide
SPISVLYKDDSSNVILKYHYNDKQQII

SEQ ID NO: 123212 - protein, 27 aa, Artificial Sequence
  Cyclic GFR-binding peptide
NAISVLYFDSSNNVILKKYRNDKQQII

SEQ ID NO: 123213 - protein, 27 aa, Artificial Sequence
  Cyclic GFR-binding peptide
NAISILYFDKGVVTYLKKYRNDKQQII

SEQ ID NO: 123214 - protein, 27 aa, Artificial Sequence
  Cyclic GFR-binding peptide
SPISILYIDAANNVVYKQYENDKQQII

SEQ ID NO: 123215 - protein, 27 aa, Artificial Sequence
  Cyclic GFR-binding peptide
NAISVLYFDDSSNVILKKYRNDKQQII

SEQ ID NO: 123216 - protein, 27 aa, Artificial Sequence
  Cyclic GFR-binding peptide
EPISVLYLDSSNNVIKFKYENDKQQII

SEQ ID NO: 123217 - protein, 27 aa, Artificial Sequence
  Cyclic GFR-binding peptide
SPISILYIVGRTPKVYKQYENDKQQII

SEQ ID NO: 123218 - protein, 27 aa, Artificial Sequence
  Cyclic GFR-binding peptide
SPISVLYIDDSSNVIYKQYENDKQQII

SEQ ID NO: 123219 - protein, 27 aa, Artificial Sequence
  Cyclic GFR-binding peptide
SPISVLYKDDMGVPTLKYHYNDKQQII

SEQ ID NO: 123220 - protein, 27 aa, Artificial Sequence
  Cyclic GFR-binding peptide
SPISVLYKDSSNNVILKYHYNDKQQII

SEQ ID NO: 123221 - protein, 27 aa, Artificial Sequence
  Cyclic GFR-binding peptide
EPISVLYLDDSSNVIKFKYENDKQQII

SEQ ID NO: 123222 - protein, 27 aa, Artificial Sequence
  Cyclic GFR-binding peptide
SPISILYKVGRTPKVLKYHYNDKQQII

SEQ ID NO: 123223 - protein, 27 aa, Artificial Sequence
  Cyclic GFR-binding peptide
EPISILYLVGRKPKVKFKYENDKQQII

SEQ ID NO: 123224 - protein, 27 aa, Artificial Sequence
  Cyclic GFR-binding peptide
SPISILYIDKGVVTYYKQYENDKQQII

SEQ ID NO: 123225 - protein, 27 aa, Artificial Sequence
  Cyclic GFR-binding peptide
EPISMLYLDENEKVVKFKYENDKQQII

SEQ ID NO: 123226 - protein, 27 aa, Artificial Sequence
  Cyclic GFR-binding peptide
SPISVLYIDDMGVPTYKQYENDKQQII

SEQ ID NO: 123227 - protein, 27 aa, Artificial Sequence
  Cyclic GFR-binding peptide
SPISVLYIDSSNNVIYKQYENDKQQII

SEQ ID NO: 123228 - protein, 27 aa, Artificial Sequence
  Cyclic GFR-binding peptide
EPISMLYLDEYDKVVKFKYENDKQQII

SEQ ID NO: 123229 - protein, 27 aa, Artificial Sequence
  Cyclic GFR-binding peptide
EPISILYLDKGVVTYKFKYENDKQQII

SEQ ID NO: 123230 - protein, 27 aa, Artificial Sequence
  Cyclic GFR-binding peptide
EPISILYLDAANNVVKFKYENDKQQII

SEQ ID NO: 123231 - protein, 27 aa, Artificial Sequence
  Cyclic GFR-binding peptide
NDKQQIIPIKGYIIQQKDNFYLMNIPS

SEQ ID NO: 123232 - protein, 27 aa, Artificial Sequence
  Cyclic GFR-binding peptide
NDKQQIIPIKGYVVKDYEDFYLMNIPS

SEQ ID NO: 123233 - protein, 27 aa, Artificial Sequence
  Cyclic GFR-binding peptide
NDKQQIIPIKGYIVNSSDDFYLVNIPS

SEQ ID NO: 123234 - protein, 27 aa, Artificial Sequence
  Cyclic GFR-binding peptide
NDKQQIIPIKGYLLVRGNDFYLMNIPS

SEQ ID NO: 123235 - protein, 27 aa, Artificial Sequence
  Cyclic GFR-binding peptide
NDKQQIIPIKGYVVNNAADFYLINIPS

SEQ ID NO: 123236 - protein, 27 aa, Artificial Sequence
  Cyclic GFR-binding peptide
NDKQQIIPIKGYVVKENEDFYLMNIPS

SEQ ID NO: 123237 - protein, 27 aa, Artificial Sequence
  Cyclic GFR-binding peptide
NDKQQIIPIKGYVVNNASDFYLINIPS

SEQ ID NO: 123238 - protein, 27 aa, Artificial Sequence
  Cyclic GFR-binding peptide
NDKQQIIPIKGYYTVVGKDFYLINIPS

SEQ ID NO: 123239 - protein, 27 aa, Artificial Sequence
  Cyclic GFR-binding peptide
NDKQQIIPIKGYTPVGMDDFYLVNIPS

SEQ ID NO: 123240 - protein, 27 aa, Artificial Sequence
  Cyclic GFR-binding peptide
NDKQQIIPIKGYIVNNSSDFYLVNIPS

SEQ ID NO: 123241 - protein, 27 aa, Artificial Sequence
  Cyclic GFR-binding peptide
SPINMLYFNDKQQIIYGKIPNDKQQII

SEQ ID NO: 123242 - protein, 27 aa, Artificial Sequence
  Cyclic GFR-binding peptide
SPINMLYFDEYDKVVYGKIPNDKQQII

SEQ ID NO: 123243 - protein, 27 aa, Artificial Sequence
  Cyclic GFR-binding peptide
SPINVLYFDDSSNVIYGKIPNDKQQII

SEQ ID NO: 123244 - protein, 27 aa, Artificial Sequence
  Cyclic GFR-binding peptide
SPINMLYFDNGRVLLYGKIPNDKQQII

SEQ ID NO: 123245 - protein, 27 aa, Artificial Sequence
  Cyclic GFR-binding peptide
SPINILYFDAANNVVYGKIPNDKQQII

SEQ ID NO: 123246 - protein, 27 aa, Artificial Sequence
  Cyclic GFR-binding peptide
SPINMLYFDENEKVVYGKIPNDKQQII

SEQ ID NO: 123247 - protein, 27 aa, Artificial Sequence
  Cyclic GFR-binding peptide
SPINILYFDSANNVVYGKIPNDKQQII

SEQ ID NO: 123248 - protein, 27 aa, Artificial Sequence
  Cyclic GFR-binding peptide
SPINILYFDKGVVTYYGKIPNDKQQII

SEQ ID NO: 123249 - protein, 27 aa, Artificial Sequence
  Cyclic GFR-binding peptide
SPINVLYFDDMGVPTYGKIPNDKQQII

SEQ ID NO: 123250 - protein, 27 aa, Artificial Sequence
  Cyclic GFR-binding peptide
SPINVLYFDSSNNVIYGKIPNDKQQII

SEQ ID NO: 123251 - protein, 27 aa, Artificial Sequence
  Cyclic GFR-binding peptide
NDKQQIIPIKGYIIQQKDNFYLMNIPS

SEQ ID NO: 123252 - protein, 27 aa, Artificial Sequence
  Cyclic GFR-binding peptide
NDKQQIIPIKGYVVKDYEDFYLMNIPS

SEQ ID NO: 123253 - protein, 27 aa, Artificial Sequence
  Cyclic GFR-binding peptide
NDKQQIIPIKGYIVNSSDDFYLVNIPS

SEQ ID NO: 123254 - protein, 27 aa, Artificial Sequence
  Cyclic GFR-binding peptide
NDKQQIIPIKGYLLVRGNDFYLMNIPS

SEQ ID NO: 123255 - protein, 27 aa, Artificial Sequence
  Cyclic GFR-binding peptide
NDKQQIIPIKGYVVNNAADFYLINIPS

SEQ ID NO: 123256 - protein, 27 aa, Artificial Sequence
  Cyclic GFR-binding peptide
NDKQQIIPIKGYVVKENEDFYLMNIPS

SEQ ID NO: 123257 - protein, 27 aa, Artificial Sequence
  Cyclic GFR-binding peptide
NDKQQIIPIKGYVVNNASDFYLINIPS

SEQ ID NO: 123258 - protein, 27 aa, Artificial Sequence
  Cyclic GFR-binding peptide
NDKQQIIPIKGYYTVVGKDFYLINIPS

SEQ ID NO: 123259 - protein, 27 aa, Artificial Sequence
  Cyclic GFR-binding peptide
NDKQQIIPIKGYTPVGMDDFYLVNIPS

SEQ ID NO: 123260 - protein, 27 aa, Artificial Sequence
  Cyclic GFR-binding peptide
NDKQQIIPIKGYIVNNSSDFYLVNIPS

SEQ ID NO: 123261 - protein, 27 aa, Artificial Sequence
  Cyclic GFR-binding peptide
SPINMLYFNDKQQIIYGKIPNDKQQII

SEQ ID NO: 123262 - protein, 27 aa, Artificial Sequence
  Cyclic GFR-binding peptide
SPINMLYFDEYDKVVYGKIPNDKQQII

SEQ ID NO: 123263 - protein, 27 aa, Artificial Sequence
  Cyclic GFR-binding peptide
SPINVLYFDDSSNVIYGKIPNDKQQII

SEQ ID NO: 123264 - protein, 27 aa, Artificial Sequence
  Cyclic GFR-binding peptide
SPINMLYFDNGRVLLYGKIPNDKQQII

SEQ ID NO: 123265 - protein, 27 aa, Artificial Sequence
  Cyclic GFR-binding peptide
SPINILYFDAANNVVYGKIPNDKQQII

SEQ ID NO: 123266 - protein, 27 aa, Artificial Sequence
  Cyclic GFR-binding peptide
SPINMLYFDENEKVVYGKIPNDKQQII

SEQ ID NO: 123267 - protein, 27 aa, Artificial Sequence
  Cyclic GFR-binding peptide
SPINILYFDSANNVVYGKIPNDKQQII

SEQ ID NO: 123268 - protein, 27 aa, Artificial Sequence
  Cyclic GFR-binding peptide
SPINILYFDKGVVTYYGKIPNDKQQII

SEQ ID NO: 123269 - protein, 27 aa, Artificial Sequence
  Cyclic GFR-binding peptide
SPINVLYFDDMGVPTYGKIPNDKQQII

SEQ ID NO: 123270 - protein, 27 aa, Artificial Sequence
  Cyclic GFR-binding peptide
SPINVLYFDSSNNVIYGKIPNDKQQII

SEQ ID NO: 123271 - protein, 27 aa, Artificial Sequence
  Cyclic GFR-binding peptide
NDKQQIIRYKKLIKPTKGIFYLISIAN

SEQ ID NO: 123272 - protein, 27 aa, Artificial Sequence
  Cyclic GFR-binding peptide
NDKQQIIRYKKLVVKDYEDFYLMSIAN

SEQ ID NO: 123273 - protein, 27 aa, Artificial Sequence
  Cyclic GFR-binding peptide
NDKQQIIRYKKLVKPTRGVFYLISIAN

SEQ ID NO: 123274 - protein, 27 aa, Artificial Sequence
  Cyclic GFR-binding peptide
NDKQQIIRYKKLVVKENEDFYLMSIAN

SEQ ID NO: 123275 - protein, 27 aa, Artificial Sequence
  Cyclic GFR-binding peptide
NDKQQIIRYKKLVKPKRGVFYLISIAN

SEQ ID NO: 123276 - protein, 27 aa, Artificial Sequence
  Cyclic GFR-binding peptide
NDKQQIIRYKKLIVNSSDDFYLVSIAN

SEQ ID NO: 123277 - protein, 27 aa, Artificial Sequence
  Cyclic GFR-binding peptide
NDKQQIIRYKKLVVNNASDFYLISIAN

SEQ ID NO: 123278 - protein, 27 aa, Artificial Sequence
  Cyclic GFR-binding peptide
NAISILYFIGKTPKILKKYRNDKQQII

SEQ ID NO: 123279 - protein, 27 aa, Artificial Sequence
  Cyclic GFR-binding peptide
NAISMLYFDEYDKVVLKKYRNDKQQII

SEQ ID NO: 123280 - protein, 27 aa, Artificial Sequence
  Cyclic GFR-binding peptide
NAISILYFVGRTPKVLKKYRNDKQQII

SEQ ID NO: 123281 - protein, 27 aa, Artificial Sequence
  Cyclic GFR-binding peptide
NAISMLYFDENEKVVLKKYRNDKQQII

SEQ ID NO: 123282 - protein, 27 aa, Artificial Sequence
  Cyclic GFR-binding peptide
NAISILYFVGRKPKVLKKYRNDKQQII

SEQ ID NO: 123283 - protein, 27 aa, Artificial Sequence
  Cyclic GFR-binding peptide
NAISVLYFDDSSNVILKKYRNDKQQII

SEQ ID NO: 123284 - protein, 27 aa, Artificial Sequence
  Cyclic GFR-binding peptide
NAISILYFDSANNVVLKKYRNDKQQII

SEQ ID NO: 123285 - protein, 27 aa, Artificial Sequence
  Cyclic GFR-binding peptide
NDKQQIIEYQKYVVKENEDIYLMSIPS

SEQ ID NO: 123286 - protein, 27 aa, Artificial Sequence
  Cyclic GFR-binding peptide
NDKQQIINSLQEVVKDYEDYYLMTLPE

SEQ ID NO: 123287 - protein, 27 aa, Artificial Sequence
  Cyclic GFR-binding peptide
NDKQQIIEYQKYVVKENEDIFLMSIPS

SEQ ID NO: 123288 - protein, 27 aa, Artificial Sequence
  Cyclic GFR-binding peptide
NDKQQIINSLQEIKPTKGIYYVIPLPE

SEQ ID NO: 123289 - protein, 27 aa, Artificial Sequence
  Cyclic GFR-binding peptide
NDKQQIINSLQEVKPKRGVYYLITLPE

SEQ ID NO: 123290 - protein, 27 aa, Artificial Sequence
  Cyclic GFR-binding peptide
NDKQQIIEYQKYVVNNAADIYLISIPS

SEQ ID NO: 123291 - protein, 27 aa, Artificial Sequence
  Cyclic GFR-binding peptide
NDKQQIINSLQEVKPTRGVYYVIPLPE

SEQ ID NO: 123292 - protein, 27 aa, Artificial Sequence
  Cyclic GFR-binding peptide
NDKQQIIEYQKYIVNSSDDIFLVSIPS

SEQ ID NO: 123293 - protein, 27 aa, Artificial Sequence
  Cyclic GFR-binding peptide
NDKQQIIEYQKYVKPTRGVIFLISIPS

SEQ ID NO: 123294 - protein, 27 aa, Artificial Sequence
  Cyclic GFR-binding peptide
NDKQQIIEYQKYVVKDYEDIYLMSIPS

SEQ ID NO: 123295 - protein, 27 aa, Artificial Sequence
  Cyclic GFR-binding peptide
NDKQQIINSLQEVVKENEDYYLMTLPE

SEQ ID NO: 123296 - protein, 27 aa, Artificial Sequence
  Cyclic GFR-binding peptide
NDKQQIINSLQEVVNNASDYYLITLPE

SEQ ID NO: 123297 - protein, 27 aa, Artificial Sequence
  Cyclic GFR-binding peptide
NDKQQIINSLQEVKPKRGVYYVIPLPE

SEQ ID NO: 123298 - protein, 27 aa, Artificial Sequence
  Cyclic GFR-binding peptide
NDKQQIIEYQKYIVNSSDDIYLVSIPS

SEQ ID NO: 123299 - protein, 27 aa, Artificial Sequence
  Cyclic GFR-binding peptide
NDKQQIINSLQEVVKENEDYYVMPLPE

SEQ ID NO: 123300 - protein, 27 aa, Artificial Sequence
  Cyclic GFR-binding peptide
NDKQQIIEYQKYVVKDYEDIFLMSIPS

SEQ ID NO: 123301 - protein, 27 aa, Artificial Sequence
  Cyclic GFR-binding peptide
NDKQQIINSLQEVVNNASDYYVIPLPE

SEQ ID NO: 123302 - protein, 27 aa, Artificial Sequence
  Cyclic GFR-binding peptide
NDKQQIIEYQKYVVNNASDIYLISIPS

SEQ ID NO: 123303 - protein, 27 aa, Artificial Sequence
  Cyclic GFR-binding peptide
NDKQQIINSLQEVKPTRGVYYLITLPE

SEQ ID NO: 123304 - protein, 27 aa, Artificial Sequence
  Cyclic GFR-binding peptide
NDKQQIIEYQKYYTVVGKDIYLISIPS

SEQ ID NO: 123305 - protein, 27 aa, Artificial Sequence
  Cyclic GFR-binding peptide
NDKQQIIEYQKYIIQQKDNIYLMSIPS

SEQ ID NO: 123306 - protein, 27 aa, Artificial Sequence
  Cyclic GFR-binding peptide
NDKQQIIEYQKYTPVGMDDIYLVSIPS

SEQ ID NO: 123307 - protein, 27 aa, Artificial Sequence
  Cyclic GFR-binding peptide
NDKQQIIEYQKYIKPTKGIIFLISIPS

SEQ ID NO: 123308 - protein, 27 aa, Artificial Sequence
  Cyclic GFR-binding peptide
NDKQQIIEYQKYIVNNSSDIYLVSIPS

SEQ ID NO: 123309 - protein, 27 aa, Artificial Sequence
  Cyclic GFR-binding peptide
NDKQQIINSLQEIKPTKGIYYLITLPE

SEQ ID NO: 123310 - protein, 27 aa, Artificial Sequence
  Cyclic GFR-binding peptide
NDKQQIIEYQKYVVNNASDIFLISIPS

SEQ ID NO: 123311 - protein, 27 aa, Artificial Sequence
  Cyclic GFR-binding peptide
NDKQQIIEYQKYVKPKRGVIFLISIPS

SEQ ID NO: 123312 - protein, 27 aa, Artificial Sequence
  Cyclic GFR-binding peptide
NDKQQIINSLQEIVNSSDDYYVVPLPE

SEQ ID NO: 123313 - protein, 27 aa, Artificial Sequence
  Cyclic GFR-binding peptide
NDKQQIINSLQEVVKDYEDYYVMPLPE

SEQ ID NO: 123314 - protein, 27 aa, Artificial Sequence
  Cyclic GFR-binding peptide
NDKQQIIEYQKYLLVRGNDIYLMSIPS

SEQ ID NO: 123315 - protein, 27 aa, Artificial Sequence
  Cyclic GFR-binding peptide
NDKQQIINSLQEIVNSSDDYYLVTLPE

SEQ ID NO: 123316 - protein, 27 aa, Artificial Sequence
  Cyclic GFR-binding peptide
SPISMLYIDENEKVVYKQYENDKQQII

SEQ ID NO: 123317 - protein, 27 aa, Artificial Sequence
  Cyclic GFR-binding peptide
EPLTMLYYDEYDKVVEQLSNNDKQQII

SEQ ID NO: 123318 - protein, 27 aa, Artificial Sequence
  Cyclic GFR-binding peptide
SPISMLFIDENEKVVYKQYENDKQQII

SEQ ID NO: 123319 - protein, 27 aa, Artificial Sequence
  Cyclic GFR-binding peptide
EPLPIVYYIGKTPKIEQLSNNDKQQII

SEQ ID NO: 123320 - protein, 27 aa, Artificial Sequence
  Cyclic GFR-binding peptide
EPLTILYYVGRKPKVEQLSNNDKQQII

SEQ ID NO: 123321 - protein, 27 aa, Artificial Sequence
  Cyclic GFR-binding peptide
SPISILYIDAANNVVYKQYENDKQQII

SEQ ID NO: 123322 - protein, 27 aa, Artificial Sequence
  Cyclic GFR-binding peptide
EPLPIVYYVGRTPKVEQLSNNDKQQII

SEQ ID NO: 123323 - protein, 27 aa, Artificial Sequence
  Cyclic GFR-binding peptide
SPISVLFIDDSSNVIYKQYENDKQQII

SEQ ID NO: 123324 - protein, 27 aa, Artificial Sequence
  Cyclic GFR-binding peptide
SPISILFIVGRTPKVYKQYENDKQQII

SEQ ID NO: 123325 - protein, 27 aa, Artificial Sequence
  Cyclic GFR-binding peptide
SPISMLYIDEYDKVVYKQYENDKQQII

SEQ ID NO: 123326 - protein, 27 aa, Artificial Sequence
  Cyclic GFR-binding peptide
EPLTMLYYDENEKVVEQLSNNDKQQII

SEQ ID NO: 123327 - protein, 27 aa, Artificial Sequence
  Cyclic GFR-binding peptide
EPLTILYYDSANNVVEQLSNNDKQQII

SEQ ID NO: 123328 - protein, 27 aa, Artificial Sequence
  Cyclic GFR-binding peptide
EPLPIVYYVGRKPKVEQLSNNDKQQII

SEQ ID NO: 123329 - protein, 27 aa, Artificial Sequence
  Cyclic GFR-binding peptide
SPISVLYIDDSSNVIYKQYENDKQQII

SEQ ID NO: 123330 - protein, 27 aa, Artificial Sequence
  Cyclic GFR-binding peptide
EPLPMVYYDENEKVVEQLSNNDKQQII

SEQ ID NO: 123331 - protein, 27 aa, Artificial Sequence
  Cyclic GFR-binding peptide
SPISMLFIDEYDKVVYKQYENDKQQII

SEQ ID NO: 123332 - protein, 27 aa, Artificial Sequence
  Cyclic GFR-binding peptide
EPLPIVYYDSANNVVEQLSNNDKQQII

SEQ ID NO: 123333 - protein, 27 aa, Artificial Sequence
  Cyclic GFR-binding peptide
SPISILYIDSANNVVYKQYENDKQQII

SEQ ID NO: 123334 - protein, 27 aa, Artificial Sequence
  Cyclic GFR-binding peptide
EPLTILYYVGRTPKVEQLSNNDKQQII

SEQ ID NO: 123335 - protein, 27 aa, Artificial Sequence
  Cyclic GFR-binding peptide
SPISILYIDKGVVTYYKQYENDKQQII

SEQ ID NO: 123336 - protein, 27 aa, Artificial Sequence
  Cyclic GFR-binding peptide
SPISMLYINDKQQIIYKQYENDKQQII

SEQ ID NO: 123337 - protein, 27 aa, Artificial Sequence
  Cyclic GFR-binding peptide
SPISVLYIDDMGVPTYKQYENDKQQII

SEQ ID NO: 123338 - protein, 27 aa, Artificial Sequence
  Cyclic GFR-binding peptide
SPISILFIIGKTPKIYKQYENDKQQII

SEQ ID NO: 123339 - protein, 27 aa, Artificial Sequence
  Cyclic GFR-binding peptide
SPISVLYIDSSNNVIYKQYENDKQQII

SEQ ID NO: 123340 - protein, 27 aa, Artificial Sequence
  Cyclic GFR-binding peptide
EPLTILYYIGKTPKIEQLSNNDKQQII

SEQ ID NO: 123341 - protein, 27 aa, Artificial Sequence
  Cyclic GFR-binding peptide
SPISILFIDSANNVVYKQYENDKQQII

SEQ ID NO: 123342 - protein, 27 aa, Artificial Sequence
  Cyclic GFR-binding peptide
SPISILFIVGRKPKVYKQYENDKQQII

SEQ ID NO: 123343 - protein, 27 aa, Artificial Sequence
  Cyclic GFR-binding peptide
EPLPVVYYDDSSNVIEQLSNNDKQQII

SEQ ID NO: 123344 - protein, 27 aa, Artificial Sequence
  Cyclic GFR-binding peptide
EPLPMVYYDEYDKVVEQLSNNDKQQII

SEQ ID NO: 123345 - protein, 27 aa, Artificial Sequence
  Cyclic GFR-binding peptide
SPISMLYIDNGRVLLYKQYENDKQQII

SEQ ID NO: 123346 - protein, 27 aa, Artificial Sequence
  Cyclic GFR-binding peptide
EPLTVLYYDDSSNVIEQLSNNDKQQII

SEQ ID NO: 123347 - protein, 27 aa, Artificial Sequence
  Cyclic GFR-binding peptide
NDKQQIIPYVKLVVKENEDFFLMSLSS

SEQ ID NO: 123348 - protein, 29 aa, Artificial Sequence
  Cyclic GFR-binding peptide
NDKQQIIPYVKLHQGQHPKIRFFLMSLSS

SEQ ID NO: 123349 - protein, 27 aa, Artificial Sequence
  Cyclic GFR-binding peptide
NDKQQIIPYVKLVVNKNEDFFLISLSS

SEQ ID NO: 123350 - protein, 27 aa, Artificial Sequence
  Cyclic GFR-binding peptide
NDKQQIIPYVKLVKPKRGVLFFISLSS

SEQ ID NO: 123351 - protein, 27 aa, Artificial Sequence
  Cyclic GFR-binding peptide
NDKQQIIPYVKLVVNNAADFFLISLSS

SEQ ID NO: 123352 - protein, 27 aa, Artificial Sequence
  Cyclic GFR-binding peptide
NDKQQIIPYVKLIVNNSSDFFLVSLSS

SEQ ID NO: 123353 - protein, 27 aa, Artificial Sequence
  Cyclic GFR-binding peptide
NDKQQIIPYVKLIIQQKDNFFLMSLSS

SEQ ID NO: 123354 - protein, 27 aa, Artificial Sequence
  Cyclic GFR-binding peptide
NDKQQIIPYVKLLLVRGNDFFLMSLSS

SEQ ID NO: 123355 - protein, 27 aa, Artificial Sequence
  Cyclic GFR-binding peptide
NDKQQIIPYVKLVKPTRGVLFFISLSS

SEQ ID NO: 123356 - protein, 27 aa, Artificial Sequence
  Cyclic GFR-binding peptide
NDKQQIIPYVKLVVNNASDFFLISLSS

SEQ ID NO: 123357 - protein, 27 aa, Artificial Sequence
  Cyclic GFR-binding peptide
NDKQQIIPYVKLIKPTKGILFFISLSS

SEQ ID NO: 123358 - protein, 27 aa, Artificial Sequence
  Cyclic GFR-binding peptide
NDKQQIIPYVKLTPVGMDDFFLVSLSS

SEQ ID NO: 123359 - protein, 27 aa, Artificial Sequence
  Cyclic GFR-binding peptide
NDKQQIIPYVKLYTVVGKDFFLISLSS

SEQ ID NO: 123360 - protein, 27 aa, Artificial Sequence
  Cyclic GFR-binding peptide
NDKQQIIPYVKLVVKDYEDFFLMSLSS

SEQ ID NO: 123361 - protein, 27 aa, Artificial Sequence
  Cyclic GFR-binding peptide
NDKQQIIPYVKLIVNSSDDFFLVSLSS

SEQ ID NO: 123362 - protein, 29 aa, Artificial Sequence
  Cyclic GFR-binding peptide
NDKQQIIPYVKLLKPKKRVYEFFLVSLSS

SEQ ID NO: 123363 - protein, 27 aa, Artificial Sequence
  Cyclic GFR-binding peptide
SSLSMLFFDENEKVVLKVYPNDKQQII

SEQ ID NO: 123364 - protein, 29 aa, Artificial Sequence
  Cyclic GFR-binding peptide
SSLSMLFFRIKPHQGQHLKVYPNDKQQII

SEQ ID NO: 123365 - protein, 27 aa, Artificial Sequence
  Cyclic GFR-binding peptide
SSLSILFFDENKNVVLKVYPNDKQQII

SEQ ID NO: 123366 - protein, 27 aa, Artificial Sequence
  Cyclic GFR-binding peptide
SSLSILFFVGRKPKVLKVYPNDKQQII

SEQ ID NO: 123367 - protein, 27 aa, Artificial Sequence
  Cyclic GFR-binding peptide
SSLSILFFDAANNVVLKVYPNDKQQII

SEQ ID NO: 123368 - protein, 27 aa, Artificial Sequence
  Cyclic GFR-binding peptide
SSLSVLFFDSSNNVILKVYPNDKQQII

SEQ ID NO: 123369 - protein, 27 aa, Artificial Sequence
  Cyclic GFR-binding peptide
SSLSMLFFNDKQQIILKVYPNDKQQII

SEQ ID NO: 123370 - protein, 27 aa, Artificial Sequence
  Cyclic GFR-binding peptide
SSLSMLFFDNGRVLLLKVYPNDKQQII

SEQ ID NO: 123371 - protein, 27 aa, Artificial Sequence
  Cyclic GFR-binding peptide
SSLSILFFVGRTPKVLKVYPNDKQQII

SEQ ID NO: 123372 - protein, 27 aa, Artificial Sequence
  Cyclic GFR-binding peptide
SSLSILFFDSANNVVLKVYPNDKQQII

SEQ ID NO: 123373 - protein, 27 aa, Artificial Sequence
  Cyclic GFR-binding peptide
SSLSILFFIGKTPKILKVYPNDKQQII

SEQ ID NO: 123374 - protein, 27 aa, Artificial Sequence
  Cyclic GFR-binding peptide
SSLSVLFFDDMGVPTLKVYPNDKQQII

SEQ ID NO: 123375 - protein, 27 aa, Artificial Sequence
  Cyclic GFR-binding peptide
SSLSILFFDKGVVTYLKVYPNDKQQII

SEQ ID NO: 123376 - protein, 27 aa, Artificial Sequence
  Cyclic GFR-binding peptide
SSLSMLFFDEYDKVVLKVYPNDKQQII

SEQ ID NO: 123377 - protein, 27 aa, Artificial Sequence
  Cyclic GFR-binding peptide
SSLSVLFFDDSSNVILKVYPNDKQQII

SEQ ID NO: 123378 - protein, 29 aa, Artificial Sequence
  Cyclic GFR-binding peptide
SSLSVLFFEYVRKKPKLLKVYPNDKQQII

SEQ ID NO: 123379 - protein, 27 aa, Artificial Sequence
  Cyclic GFR-binding peptide
NDKQQIINSLQEVVKDYEDYYLMTLPE

SEQ ID NO: 123380 - protein, 27 aa, Artificial Sequence
  Cyclic GFR-binding peptide
NDKQQIINSLQEIKPTKGIYYVIPLPE

SEQ ID NO: 123381 - protein, 27 aa, Artificial Sequence
  Cyclic GFR-binding peptide
NDKQQIISMEGIIVNSSDDMIQVTINS

SEQ ID NO: 123382 - protein, 27 aa, Artificial Sequence
  Cyclic GFR-binding peptide
NDKQQIINSLQEVKPKRGVYYLITLPE

SEQ ID NO: 123383 - protein, 27 aa, Artificial Sequence
  Cyclic GFR-binding peptide
NDKQQIINSLQEVKPTRGVYYVIPLPE

SEQ ID NO: 123384 - protein, 27 aa, Artificial Sequence
  Cyclic GFR-binding peptide
NDKQQIIVTAKKVVKENEDIKRMQVPR

SEQ ID NO: 123385 - protein, 27 aa, Artificial Sequence
  Cyclic GFR-binding peptide
NDKQQIINSLQEIVNSSDDYYVVPLPE

SEQ ID NO: 123386 - protein, 29 aa, Artificial Sequence
  Cyclic GFR-binding peptide
NDKQQIISMEGIHQGQHPKIRMIQMTINS

SEQ ID NO: 123387 - protein, 29 aa, Artificial Sequence
  Cyclic GFR-binding peptide
NDKQQIIVTAKKLKPKKRVYEIKRVQVPR

SEQ ID NO: 123388 - protein, 27 aa, Artificial Sequence
  Cyclic GFR-binding peptide
NDKQQIISMEGIVVKDYEDMIQMTINS

SEQ ID NO: 123389 - protein, 29 aa, Artificial Sequence
  Cyclic GFR-binding peptide
NDKQQIIVQVEKHQGQHPKIRVKAMKVSR

SEQ ID NO: 123390 - protein, 27 aa, Artificial Sequence
  Cyclic GFR-binding peptide
NDKQQIIVTAKKIKPTKGIIKRIQVPR

SEQ ID NO: 123391 - protein, 27 aa, Artificial Sequence
  Cyclic GFR-binding peptide
NDKQQIISMEGIVKPTRGVMIQITINS

SEQ ID NO: 123392 - protein, 29 aa, Artificial Sequence
  Cyclic GFR-binding peptide
NDKQQIINSLQEFIPKKRVIEYYVVPLPE

SEQ ID NO: 123393 - protein, 27 aa, Artificial Sequence
  Cyclic GFR-binding peptide
NDKQQIIVQVEKVKPKRGVVKAIKVSR

SEQ ID NO: 123394 - protein, 27 aa, Artificial Sequence
  Cyclic GFR-binding peptide
NDKQQIIVQVEKVVKENEDVKAMKVSR

SEQ ID NO: 123395 - protein, 27 aa, Artificial Sequence
  Cyclic GFR-binding peptide
NDKQQIINSLQEVVKENEDYYVMPLPE

SEQ ID NO: 123396 - protein, 27 aa, Artificial Sequence
  Cyclic GFR-binding peptide
NDKQQIIVTAKKIVNSSDDIKRVQVPR

SEQ ID NO: 123397 - protein, 27 aa, Artificial Sequence
  Cyclic GFR-binding peptide
NDKQQIIVQVEKIKPTKGIVKAIKVSR

SEQ ID NO: 123398 - protein, 27 aa, Artificial Sequence
  Cyclic GFR-binding peptide
NDKQQIINSLQEIKPTKGIYYLITLPE

SEQ ID NO: 123399 - protein, 29 aa, Artificial Sequence
  Cyclic GFR-binding peptide
NDKQQIINSLQEFIPKKRVIEYYLVTLPE

SEQ ID NO: 123400 - protein, 27 aa, Artificial Sequence
  Cyclic GFR-binding peptide
NDKQQIIVQVEKIVNSSDDVKAVKVSR

SEQ ID NO: 123401 - protein, 27 aa, Artificial Sequence
  Cyclic GFR-binding peptide
NDKQQIINSLQEIVNSSDDYYLVTLPE

SEQ ID NO: 123402 - protein, 29 aa, Artificial Sequence
  Cyclic GFR-binding peptide
NDKQQIIVQVEKLKPKKRVYEVKAVKVSR

SEQ ID NO: 123403 - protein, 29 aa, Artificial Sequence
  Cyclic GFR-binding peptide
NDKQQIIVQVEKFIPKKRVIEVKAVKVSR

SEQ ID NO: 123404 - protein, 29 aa, Artificial Sequence
  Cyclic GFR-binding peptide
NDKQQIIVTAKKHQGQHPKIRIKRMQVPR

SEQ ID NO: 123405 - protein, 27 aa, Artificial Sequence
  Cyclic GFR-binding peptide
NDKQQIINSLQEVVKENEDYYLMTLPE

SEQ ID NO: 123406 - protein, 29 aa, Artificial Sequence
  Cyclic GFR-binding peptide
NDKQQIISMEGIFIPKKRVIEMIQVTINS

SEQ ID NO: 123407 - protein, 27 aa, Artificial Sequence
  Cyclic GFR-binding peptide
NDKQQIINSLQEVKPKRGVYYVIPLPE

SEQ ID NO: 123408 - protein, 27 aa, Artificial Sequence
  Cyclic GFR-binding peptide
NDKQQIIVTAKKVKPKRGVIKRIQVPR

SEQ ID NO: 123409 - protein, 27 aa, Artificial Sequence
  Cyclic GFR-binding peptide
NDKQQIINSLQEVKPTRGVYYLITLPE

SEQ ID NO: 123410 - protein, 27 aa, Artificial Sequence
  Cyclic GFR-binding peptide
NDKQQIIVQVEKVKPTRGVVKAIKVSR

SEQ ID NO: 123411 - protein, 29 aa, Artificial Sequence
  Cyclic GFR-binding peptide
NDKQQIISMEGILKPKKRVYEMIQVTINS

SEQ ID NO: 123412 - protein, 27 aa, Artificial Sequence
  Cyclic GFR-binding peptide
NDKQQIINSLQEVVKDYEDYYVMPLPE

SEQ ID NO: 123413 - protein, 27 aa, Artificial Sequence
  Cyclic GFR-binding peptide
NDKQQIIVTAKKVKPTRGVIKRIQVPR

SEQ ID NO: 123414 - protein, 29 aa, Artificial Sequence
  Cyclic GFR-binding peptide
NDKQQIINSLQELKPKKRVYEYYLVTLPE

SEQ ID NO: 123415 - protein, 27 aa, Artificial Sequence
  Cyclic GFR-binding peptide
NDKQQIISMEGIVKPKRGVMIQITINS

SEQ ID NO: 123416 - protein, 27 aa, Artificial Sequence
  Cyclic GFR-binding peptide
NDKQQIISMEGIVVKENEDMIQMTINS

SEQ ID NO: 123417 - protein, 27 aa, Artificial Sequence
  Cyclic GFR-binding peptide
NDKQQIISMEGIIKPTKGIMIQITINS

SEQ ID NO: 123418 - protein, 29 aa, Artificial Sequence
  Cyclic GFR-binding peptide
NDKQQIINSLQEHQGQHPKIRYYLMTLPE

SEQ ID NO: 123419 - protein, 27 aa, Artificial Sequence
  Cyclic GFR-binding peptide
NDKQQIIVTAKKVVKDYEDIKRMQVPR

SEQ ID NO: 123420 - protein, 29 aa, Artificial Sequence
  Cyclic GFR-binding peptide
NDKQQIINSLQEHQGQHPKIRYYVMPLPE

SEQ ID NO: 123421 - protein, 29 aa, Artificial Sequence
  Cyclic GFR-binding peptide
NDKQQIINSLQELKPKKRVYEYYVVPLPE

SEQ ID NO: 123422 - protein, 29 aa, Artificial Sequence
  Cyclic GFR-binding peptide
NDKQQIIVTAKKFIPKKRVIEIKRVQVPR

SEQ ID NO: 123423 - protein, 27 aa, Artificial Sequence
  Cyclic GFR-binding peptide
NDKQQIIVQVEKVVKDYEDVKAMKVSR

SEQ ID NO: 123424 - protein, 27 aa, Artificial Sequence
  Cyclic GFR-binding peptide
EPLTMLYYDEYDKVVEQLSNNDKQQII

SEQ ID NO: 123425 - protein, 27 aa, Artificial Sequence
  Cyclic GFR-binding peptide
EPLPIVYYIGKTPKIEQLSNNDKQQII

SEQ ID NO: 123426 - protein, 27 aa, Artificial Sequence
  Cyclic GFR-binding peptide
SNITVQIMDDSSNVIIGEMSNDKQQII

SEQ ID NO: 123427 - protein, 27 aa, Artificial Sequence
  Cyclic GFR-binding peptide
EPLTILYYVGRKPKVEQLSNNDKQQII

SEQ ID NO: 123428 - protein, 27 aa, Artificial Sequence
  Cyclic GFR-binding peptide
EPLPIVYYVGRTPKVEQLSNNDKQQII

SEQ ID NO: 123429 - protein, 27 aa, Artificial Sequence
  Cyclic GFR-binding peptide
RPVQMRKIDENEKVVKKATVNDKQQII

SEQ ID NO: 123430 - protein, 27 aa, Artificial Sequence
  Cyclic GFR-binding peptide
EPLPVVYYDDSSNVIEQLSNNDKQQII

SEQ ID NO: 123431 - protein, 29 aa, Artificial Sequence
  Cyclic GFR-binding peptide
SNITMQIMRIKPHQGQHIGEMSNDKQQII

SEQ ID NO: 123432 - protein, 29 aa, Artificial Sequence
  Cyclic GFR-binding peptide
RPVQVRKIEYVRKKPKLKKATVNDKQQII

SEQ ID NO: 123433 - protein, 27 aa, Artificial Sequence
  Cyclic GFR-binding peptide
SNITMQIMDEYDKVVIGEMSNDKQQII

SEQ ID NO: 123434 - protein, 29 aa, Artificial Sequence
  Cyclic GFR-binding peptide
RSVKMAKVRIKPHQGQHKEVQVNDKQQII

SEQ ID NO: 123435 - protein, 27 aa, Artificial Sequence
  Cyclic GFR-binding peptide
RPVQIRKIIGKTPKIKKATVNDKQQII

SEQ ID NO: 123436 - protein, 27 aa, Artificial Sequence
  Cyclic GFR-binding peptide
SNITIQIMVGRTPKVIGEMSNDKQQII

SEQ ID NO: 123437 - protein, 29 aa, Artificial Sequence
  Cyclic GFR-binding peptide
EPLPVVYYEIVRKKPIFEQLSNNDKQQII

SEQ ID NO: 123438 - protein, 27 aa, Artificial Sequence
  Cyclic GFR-binding peptide
RSVKIAKVVGRKPKVKEVQVNDKQQII

SEQ ID NO: 123439 - protein, 27 aa, Artificial Sequence
  Cyclic GFR-binding peptide
RSVKMAKVDENEKVVKEVQVNDKQQII

SEQ ID NO: 123440 - protein, 27 aa, Artificial Sequence
  Cyclic GFR-binding peptide
EPLPMVYYDENEKVVEQLSNNDKQQII

SEQ ID NO: 123441 - protein, 27 aa, Artificial Sequence
  Cyclic GFR-binding peptide
RPVQVRKIDDSSNVIKKATVNDKQQII

SEQ ID NO: 123442 - protein, 27 aa, Artificial Sequence
  Cyclic GFR-binding peptide
RSVKIAKVIGKTPKIKEVQVNDKQQII

SEQ ID NO: 123443 - protein, 27 aa, Artificial Sequence
  Cyclic GFR-binding peptide
EPLTILYYIGKTPKIEQLSNNDKQQII

SEQ ID NO: 123444 - protein, 29 aa, Artificial Sequence
  Cyclic GFR-binding peptide
EPLTVLYYEIVRKKPIFEQLSNNDKQQII

SEQ ID NO: 123445 - protein, 27 aa, Artificial Sequence
  Cyclic GFR-binding peptide
RSVKVAKVDDSSNVIKEVQVNDKQQII

SEQ ID NO: 123446 - protein, 27 aa, Artificial Sequence
  Cyclic GFR-binding peptide
EPLTVLYYDDSSNVIEQLSNNDKQQII

SEQ ID NO: 123447 - protein, 29 aa, Artificial Sequence
  Cyclic GFR-binding peptide
RSVKVAKVEYVRKKPKLKEVQVNDKQQII

SEQ ID NO: 123448 - protein, 29 aa, Artificial Sequence
  Cyclic GFR-binding peptide
RSVKVAKVEIVRKKPIFKEVQVNDKQQII

SEQ ID NO: 123449 - protein, 29 aa, Artificial Sequence
  Cyclic GFR-binding peptide
RPVQMRKIRIKPHQGQHKKATVNDKQQII

SEQ ID NO: 123450 - protein, 27 aa, Artificial Sequence
  Cyclic GFR-binding peptide
EPLTMLYYDENEKVVEQLSNNDKQQII

SEQ ID NO: 123451 - protein, 29 aa, Artificial Sequence
  Cyclic GFR-binding peptide
SNITVQIMEIVRKKPIFIGEMSNDKQQII

SEQ ID NO: 123452 - protein, 27 aa, Artificial Sequence
  Cyclic GFR-binding peptide
EPLPIVYYVGRKPKVEQLSNNDKQQII

SEQ ID NO: 123453 - protein, 27 aa, Artificial Sequence
  Cyclic GFR-binding peptide
RPVQIRKIVGRKPKVKKATVNDKQQII

SEQ ID NO: 123454 - protein, 27 aa, Artificial Sequence
  Cyclic GFR-binding peptide
EPLTILYYVGRTPKVEQLSNNDKQQII

SEQ ID NO: 123455 - protein, 27 aa, Artificial Sequence
  Cyclic GFR-binding peptide
RSVKIAKVVGRTPKVKEVQVNDKQQII

SEQ ID NO: 123456 - protein, 29 aa, Artificial Sequence
  Cyclic GFR-binding peptide
SNITVQIMEYVRKKPKLIGEMSNDKQQII

SEQ ID NO: 123457 - protein, 27 aa, Artificial Sequence
  Cyclic GFR-binding peptide
EPLPMVYYDEYDKVVEQLSNNDKQQII

SEQ ID NO: 123458 - protein, 27 aa, Artificial Sequence
  Cyclic GFR-binding peptide
RPVQIRKIVGRTPKVKKATVNDKQQII

SEQ ID NO: 123459 - protein, 29 aa, Artificial Sequence
  Cyclic GFR-binding peptide
EPLTVLYYEYVRKKPKLEQLSNNDKQQII

SEQ ID NO: 123460 - protein, 27 aa, Artificial Sequence
  Cyclic GFR-binding peptide
SNITIQIMVGRKPKVIGEMSNDKQQII

SEQ ID NO: 123461 - protein, 27 aa, Artificial Sequence
  Cyclic GFR-binding peptide
SNITMQIMDENEKVVIGEMSNDKQQII

SEQ ID NO: 123462 - protein, 27 aa, Artificial Sequence
  Cyclic GFR-binding peptide
SNITIQIMIGKTPKIIGEMSNDKQQII

SEQ ID NO: 123463 - protein, 29 aa, Artificial Sequence
  Cyclic GFR-binding peptide
EPLTMLYYRIKPHQGQHEQLSNNDKQQII

SEQ ID NO: 123464 - protein, 27 aa, Artificial Sequence
  Cyclic GFR-binding peptide
RPVQMRKIDEYDKVVKKATVNDKQQII

SEQ ID NO: 123465 - protein, 29 aa, Artificial Sequence
  Cyclic GFR-binding peptide
EPLPMVYYRIKPHQGQHEQLSNNDKQQII

SEQ ID NO: 123466 - protein, 29 aa, Artificial Sequence
  Cyclic GFR-binding peptide
EPLPVVYYEYVRKKPKLEQLSNNDKQQII

SEQ ID NO: 123467 - protein, 29 aa, Artificial Sequence
  Cyclic GFR-binding peptide
RPVQVRKIEIVRKKPIFKKATVNDKQQII

SEQ ID NO: 123468 - protein, 27 aa, Artificial Sequence
  Cyclic GFR-binding peptide
RSVKMAKVDEYDKVVKEVQVNDKQQII

SEQ ID NO: 123469 - protein, 27 aa, Artificial Sequence
  Cyclic GFR-binding peptide
NDKQQIIRYKKLIIQQKDNFYLMSIAN

SEQ ID NO: 123470 - protein, 27 aa, Artificial Sequence
  Cyclic GFR-binding peptide
NDKQQIIRYKKLIVNNSSDFYLVSIAN

SEQ ID NO: 123471 - protein, 27 aa, Artificial Sequence
  Cyclic GFR-binding peptide
NDKQQIIRYKKLYTVVGKDFYLISIAN

SEQ ID NO: 123472 - protein, 27 aa, Artificial Sequence
  Cyclic GFR-binding peptide
NDKQQIIRYKKLIVNSSDDFYLVSIAN

SEQ ID NO: 123473 - protein, 27 aa, Artificial Sequence
  Cyclic GFR-binding peptide
NDKQQIIRYKKLVVKDYEDFYLMSIAN

SEQ ID NO: 123474 - protein, 27 aa, Artificial Sequence
  Cyclic GFR-binding peptide
NDKQQIIRYKKLLLVRGNDFYLMSIAN

SEQ ID NO: 123475 - protein, 27 aa, Artificial Sequence
  Cyclic GFR-binding peptide
NDKQQIIRYKKLVVKENEDFYLMSIAN

SEQ ID NO: 123476 - protein, 27 aa, Artificial Sequence
  Cyclic GFR-binding peptide
NDKQQIIRYKKLVVNNAADFYLISIAN

SEQ ID NO: 123477 - protein, 27 aa, Artificial Sequence
  Cyclic GFR-binding peptide
NDKQQIIRYKKLTPVGMDDFYLVSIAN

SEQ ID NO: 123478 - protein, 27 aa, Artificial Sequence
  Cyclic GFR-binding peptide
NDKQQIIRYKKLVVNNASDFYLISIAN

SEQ ID NO: 123479 - protein, 27 aa, Artificial Sequence
  Cyclic GFR-binding peptide
NAISMLYFNDKQQIILKKYRNDKQQII

SEQ ID NO: 123480 - protein, 27 aa, Artificial Sequence
  Cyclic GFR-binding peptide
NAISVLYFDSSNNVILKKYRNDKQQII

SEQ ID NO: 123481 - protein, 27 aa, Artificial Sequence
  Cyclic GFR-binding peptide
NAISILYFDKGVVTYLKKYRNDKQQII

SEQ ID NO: 123482 - protein, 27 aa, Artificial Sequence
  Cyclic GFR-binding peptide
NAISVLYFDDSSNVILKKYRNDKQQII

SEQ ID NO: 123483 - protein, 27 aa, Artificial Sequence
  Cyclic GFR-binding peptide
NAISMLYFDEYDKVVLKKYRNDKQQII

SEQ ID NO: 123484 - protein, 27 aa, Artificial Sequence
  Cyclic GFR-binding peptide
NAISMLYFDNGRVLLLKKYRNDKQQII

SEQ ID NO: 123485 - protein, 27 aa, Artificial Sequence
  Cyclic GFR-binding peptide
NAISMLYFDENEKVVLKKYRNDKQQII

SEQ ID NO: 123486 - protein, 27 aa, Artificial Sequence
  Cyclic GFR-binding peptide
NAISILYFDAANNVVLKKYRNDKQQII

SEQ ID NO: 123487 - protein, 27 aa, Artificial Sequence
  Cyclic GFR-binding peptide
NAISVLYFDDMGVPTLKKYRNDKQQII

SEQ ID NO: 123488 - protein, 27 aa, Artificial Sequence
  Cyclic GFR-binding peptide
NAISILYFDSANNVVLKKYRNDKQQII

SEQ ID NO: 123489 - protein, 27 aa, Artificial Sequence
  Cyclic GFR-binding peptide
NDKQQIIEYKFKVKPTRGVLYLISIPE

SEQ ID NO: 123490 - protein, 27 aa, Artificial Sequence
  Cyclic GFR-binding peptide
NDKQQIIYHYKLVVKDYEDKYLMSIPS

SEQ ID NO: 123491 - protein, 27 aa, Artificial Sequence
  Cyclic GFR-binding peptide
NDKQQIIEYKFKTPVGMDDLYLVSIPE

SEQ ID NO: 123492 - protein, 27 aa, Artificial Sequence
  Cyclic GFR-binding peptide
NDKQQIIRYKKLVVKDYEDFYLMSIAN

SEQ ID NO: 123493 - protein, 27 aa, Artificial Sequence
  Cyclic GFR-binding peptide
NDKQQIIRHKRLVKPKRGVYYLISTAS

SEQ ID NO: 123494 - protein, 27 aa, Artificial Sequence
  Cyclic GFR-binding peptide
NDKQQIIYHYKLVKPKRGVKYLISIPS

SEQ ID NO: 123495 - protein, 27 aa, Artificial Sequence
  Cyclic GFR-binding peptide
NDKQQIIEYKFKIKPTKGILYLISIPE

SEQ ID NO: 123496 - protein, 27 aa, Artificial Sequence
  Cyclic GFR-binding peptide
NDKQQIIEYKFKVVNKNEDLYLISIPE

SEQ ID NO: 123497 - protein, 27 aa, Artificial Sequence
  Cyclic GFR-binding peptide
NDKQQIIPIKGYVKPTRGVFYLINIPS

SEQ ID NO: 123498 - protein, 27 aa, Artificial Sequence
  Cyclic GFR-binding peptide
NDKQQIIPIKGYVVKENEDFYLMNIPS

SEQ ID NO: 123499 - protein, 27 aa, Artificial Sequence
  Cyclic GFR-binding peptide
NDKQQIIYHYKLYTVVGKDKYLISIPS

SEQ ID NO: 123500 - protein, 27 aa, Artificial Sequence
  Cyclic GFR-binding peptide
NDKQQIIEYKFKLLVRGNDLYLMSIPE

SEQ ID NO: 123501 - protein, 27 aa, Artificial Sequence
  Cyclic GFR-binding peptide
NDKQQIIRYKKLVKPKRGVFYLISIAN

SEQ ID NO: 123502 - protein, 27 aa, Artificial Sequence
  Cyclic GFR-binding peptide
NDKQQIIPIKGYTPVGMDDFYLVNIPS

SEQ ID NO: 123503 - protein, 27 aa, Artificial Sequence
  Cyclic GFR-binding peptide
NDKQQIIYHYKLVVNKNEDKYLISIPS

SEQ ID NO: 123504 - protein, 27 aa, Artificial Sequence
  Cyclic GFR-binding peptide
NDKQQIIYHYKLIVNSSDDKYLVSIPS

SEQ ID NO: 123505 - protein, 27 aa, Artificial Sequence
  Cyclic GFR-binding peptide
NDKQQIIPIKGYIVNSSDDFYLVNIPS

SEQ ID NO: 123506 - protein, 27 aa, Artificial Sequence
  Cyclic GFR-binding peptide
NDKQQIIRYKKLYTVVGKDFYLISIAN

SEQ ID NO: 123507 - protein, 27 aa, Artificial Sequence
  Cyclic GFR-binding peptide
NDKQQIIRHKRLLLVRGNDYYLMSTAS

SEQ ID NO: 123508 - protein, 27 aa, Artificial Sequence
  Cyclic GFR-binding peptide
NDKQQIIYHYKLLLVRGNDKYLMSIPS

SEQ ID NO: 123509 - protein, 27 aa, Artificial Sequence
  Cyclic GFR-binding peptide
NDKQQIIRYKKLIVNSSDDFYLVSIAN

SEQ ID NO: 123510 - protein, 27 aa, Artificial Sequence
  Cyclic GFR-binding peptide
NDKQQIIRHKRLVVNKNEDYYLISTAS

SEQ ID NO: 123511 - protein, 27 aa, Artificial Sequence
  Cyclic GFR-binding peptide
NDKQQIIRHKRLIKPTKGIYYLISTAS

SEQ ID NO: 123512 - protein, 27 aa, Artificial Sequence
  Cyclic GFR-binding peptide
NDKQQIIPIKGYYTVVGKDFYLINIPS

SEQ ID NO: 123513 - protein, 27 aa, Artificial Sequence
  Cyclic GFR-binding peptide
NDKQQIIYHYKLTPVGMDDKYLVSIPS

SEQ ID NO: 123514 - protein, 27 aa, Artificial Sequence
  Cyclic GFR-binding peptide
NDKQQIIRHKRLIVNNSSDYYLVSTAS

SEQ ID NO: 123515 - protein, 27 aa, Artificial Sequence
  Cyclic GFR-binding peptide
NDKQQIIRYKKLLLVRGNDFYLMSIAN

SEQ ID NO: 123516 - protein, 27 aa, Artificial Sequence
  Cyclic GFR-binding peptide
NDKQQIIYHYKLVKPTRGVKYLISIPS

SEQ ID NO: 123517 - protein, 27 aa, Artificial Sequence
  Cyclic GFR-binding peptide
NDKQQIIRHKRLIVNSSDDYYLVSTAS

SEQ ID NO: 123518 - protein, 27 aa, Artificial Sequence
  Cyclic GFR-binding peptide
NDKQQIIPIKGYLLVRGNDFYLMNIPS

SEQ ID NO: 123519 - protein, 27 aa, Artificial Sequence
  Cyclic GFR-binding peptide
NDKQQIIRYKKLVVNKNEDFYLISIAN

SEQ ID NO: 123520 - protein, 27 aa, Artificial Sequence
  Cyclic GFR-binding peptide
NDKQQIIEYKFKVVKDYEDLYLMSIPE

SEQ ID NO: 123521 - protein, 27 aa, Artificial Sequence
  Cyclic GFR-binding peptide
NDKQQIIPIKGYVVNKNEDFYLINIPS

SEQ ID NO: 123522 - protein, 27 aa, Artificial Sequence
  Cyclic GFR-binding peptide
NDKQQIIPIKGYIKPTKGIFYLINIPS

SEQ ID NO: 123523 - protein, 27 aa, Artificial Sequence
  Cyclic GFR-binding peptide
NDKQQIIEYKFKVVNNAADLYLISIPE

SEQ ID NO: 123524 - protein, 27 aa, Artificial Sequence
  Cyclic GFR-binding peptide
NDKQQIIRHKRLYTVVGKDYYLISTAS

SEQ ID NO: 123525 - protein, 27 aa, Artificial Sequence
  Cyclic GFR-binding peptide
NDKQQIIRYKKLIKPTKGIFYLISIAN

SEQ ID NO: 123526 - protein, 27 aa, Artificial Sequence
  Cyclic GFR-binding peptide
NDKQQIIPIKGYVVKDYEDFYLMNIPS

SEQ ID NO: 123527 - protein, 27 aa, Artificial Sequence
  Cyclic GFR-binding peptide
NDKQQIIEYKFKVVNNASDLYLISIPE

SEQ ID NO: 123528 - protein, 27 aa, Artificial Sequence
  Cyclic GFR-binding peptide
NDKQQIIRYKKLVKPTRGVFYLISIAN

SEQ ID NO: 123529 - protein, 27 aa, Artificial Sequence
  Cyclic GFR-binding peptide
NDKQQIIRHKRLVVKENEDYYLMSTAS

SEQ ID NO: 123530 - protein, 27 aa, Artificial Sequence
  Cyclic GFR-binding peptide
NDKQQIIYHYKLIKPTKGIKYLISIPS

SEQ ID NO: 123531 - protein, 27 aa, Artificial Sequence
  Cyclic GFR-binding peptide
NDKQQIIYHYKLVVKENEDKYLMSIPS

SEQ ID NO: 123532 - protein, 27 aa, Artificial Sequence
  Cyclic GFR-binding peptide
NDKQQIIRHKRLIIQQKDNYYLMSTAS

SEQ ID NO: 123533 - protein, 27 aa, Artificial Sequence
  Cyclic GFR-binding peptide
NDKQQIIRYKKLVVKENEDFYLMSIAN

SEQ ID NO: 123534 - protein, 27 aa, Artificial Sequence
  Cyclic GFR-binding peptide
NDKQQIIRYKKLVVNNAADFYLISIAN

SEQ ID NO: 123535 - protein, 27 aa, Artificial Sequence
  Cyclic GFR-binding peptide
NDKQQIIEYKFKIIQQKDNLYLMSIPE

SEQ ID NO: 123536 - protein, 27 aa, Artificial Sequence
  Cyclic GFR-binding peptide
NDKQQIIRYKKLTPVGMDDFYLVSIAN

SEQ ID NO: 123537 - protein, 27 aa, Artificial Sequence
  Cyclic GFR-binding peptide
NDKQQIIYHYKLVVNNAADKYLISIPS

SEQ ID NO: 123538 - protein, 27 aa, Artificial Sequence
  Cyclic GFR-binding peptide
NDKQQIIPIKGYIVNNSSDFYLVNIPS

SEQ ID NO: 123539 - protein, 27 aa, Artificial Sequence
  Cyclic GFR-binding peptide
NDKQQIIPIKGYVKPKRGVFYLINIPS

SEQ ID NO: 123540 - protein, 27 aa, Artificial Sequence
  Cyclic GFR-binding peptide
NDKQQIIRYKKLIIQQKDNFYLMSIAN

SEQ ID NO: 123541 - protein, 27 aa, Artificial Sequence
  Cyclic GFR-binding peptide
NDKQQIIPIKGYIIQQKDNFYLMNIPS

SEQ ID NO: 123542 - protein, 27 aa, Artificial Sequence
  Cyclic GFR-binding peptide
NDKQQIIRYKKLIVNNSSDFYLVSIAN

SEQ ID NO: 123543 - protein, 27 aa, Artificial Sequence
  Cyclic GFR-binding peptide
NDKQQIIPIKGYVVNNAADFYLINIPS

SEQ ID NO: 123544 - protein, 27 aa, Artificial Sequence
  Cyclic GFR-binding peptide
NDKQQIIRHKRLVKPTRGVYYLISTAS

SEQ ID NO: 123545 - protein, 27 aa, Artificial Sequence
  Cyclic GFR-binding peptide
NDKQQIIEYKFKIVNNSSDLYLVSIPE

SEQ ID NO: 123546 - protein, 27 aa, Artificial Sequence
  Cyclic GFR-binding peptide
NDKQQIIRHKRLVVNNASDYYLISTAS

SEQ ID NO: 123547 - protein, 27 aa, Artificial Sequence
  Cyclic GFR-binding peptide
NDKQQIIRHKRLTPVGMDDYYLVSTAS

SEQ ID NO: 123548 - protein, 27 aa, Artificial Sequence
  Cyclic GFR-binding peptide
NDKQQIIYHYKLIVNNSSDKYLVSIPS

SEQ ID NO: 123549 - protein, 27 aa, Artificial Sequence
  Cyclic GFR-binding peptide
NDKQQIIYHYKLVVNNASDKYLISIPS

SEQ ID NO: 123550 - protein, 27 aa, Artificial Sequence
  Cyclic GFR-binding peptide
NDKQQIIEYKFKIVNSSDDLYLVSIPE

SEQ ID NO: 123551 - protein, 27 aa, Artificial Sequence
  Cyclic GFR-binding peptide
NDKQQIIEYKFKVKPKRGVLYLISIPE

SEQ ID NO: 123552 - protein, 27 aa, Artificial Sequence
  Cyclic GFR-binding peptide
NDKQQIIRHKRLVVKDYEDYYLMSTAS

SEQ ID NO: 123553 - protein, 27 aa, Artificial Sequence
  Cyclic GFR-binding peptide
NDKQQIIEYKFKVVKENEDLYLMSIPE

SEQ ID NO: 123554 - protein, 27 aa, Artificial Sequence
  Cyclic GFR-binding peptide
NDKQQIIEYKFKYTVVGKDLYLISIPE

SEQ ID NO: 123555 - protein, 27 aa, Artificial Sequence
  Cyclic GFR-binding peptide
NDKQQIIPIKGYVVNNASDFYLINIPS

SEQ ID NO: 123556 - protein, 27 aa, Artificial Sequence
  Cyclic GFR-binding peptide
NDKQQIIYHYKLIIQQKDNKYLMSIPS

SEQ ID NO: 123557 - protein, 27 aa, Artificial Sequence
  Cyclic GFR-binding peptide
NDKQQIIRYKKLVVNNASDFYLISIAN

SEQ ID NO: 123558 - protein, 27 aa, Artificial Sequence
  Cyclic GFR-binding peptide
NDKQQIIRHKRLVVNNAADYYLISTAS

SEQ ID NO: 123559 - protein, 27 aa, Artificial Sequence
  Cyclic GFR-binding peptide
EPISILYLVGRTPKVKFKYENDKQQII

SEQ ID NO: 123560 - protein, 27 aa, Artificial Sequence
  Cyclic GFR-binding peptide
SPISMLYKDEYDKVVLKYHYNDKQQII

SEQ ID NO: 123561 - protein, 27 aa, Artificial Sequence
  Cyclic GFR-binding peptide
EPISVLYLDDMGVPTKFKYENDKQQII

SEQ ID NO: 123562 - protein, 27 aa, Artificial Sequence
  Cyclic GFR-binding peptide
NAISMLYFDEYDKVVLKKYRNDKQQII

SEQ ID NO: 123563 - protein, 27 aa, Artificial Sequence
  Cyclic GFR-binding peptide
SATSILYYVGRKPKVLRKHRNDKQQII

SEQ ID NO: 123564 - protein, 27 aa, Artificial Sequence
  Cyclic GFR-binding peptide
SPISILYKVGRKPKVLKYHYNDKQQII

SEQ ID NO: 123565 - protein, 27 aa, Artificial Sequence
  Cyclic GFR-binding peptide
EPISILYLIGKTPKIKFKYENDKQQII

SEQ ID NO: 123566 - protein, 27 aa, Artificial Sequence
  Cyclic GFR-binding peptide
EPISILYLDENKNVVKFKYENDKQQII

SEQ ID NO: 123567 - protein, 27 aa, Artificial Sequence
  Cyclic GFR-binding peptide
SPINILYFVGRTPKVYGKIPNDKQQII

SEQ ID NO: 123568 - protein, 27 aa, Artificial Sequence
  Cyclic GFR-binding peptide
SPINMLYFDENEKVVYGKIPNDKQQII

SEQ ID NO: 123569 - protein, 27 aa, Artificial Sequence
  Cyclic GFR-binding peptide
SPISILYKDKGVVTYLKYHYNDKQQII

SEQ ID NO: 123570 - protein, 27 aa, Artificial Sequence
  Cyclic GFR-binding peptide
EPISMLYLDNGRVLLKFKYENDKQQII

SEQ ID NO: 123571 - protein, 27 aa, Artificial Sequence
  Cyclic GFR-binding peptide
NAISILYFVGRKPKVLKKYRNDKQQII

SEQ ID NO: 123572 - protein, 27 aa, Artificial Sequence
  Cyclic GFR-binding peptide
SPINVLYFDDMGVPTYGKIPNDKQQII

SEQ ID NO: 123573 - protein, 27 aa, Artificial Sequence
  Cyclic GFR-binding peptide
SPISILYKDENKNVVLKYHYNDKQQII

SEQ ID NO: 123574 - protein, 27 aa, Artificial Sequence
  Cyclic GFR-binding peptide
SPISVLYKDDSSNVILKYHYNDKQQII

SEQ ID NO: 123575 - protein, 27 aa, Artificial Sequence
  Cyclic GFR-binding peptide
SPINVLYFDDSSNVIYGKIPNDKQQII

SEQ ID NO: 123576 - protein, 27 aa, Artificial Sequence
  Cyclic GFR-binding peptide
NAISILYFDKGVVTYLKKYRNDKQQII

SEQ ID NO: 123577 - protein, 27 aa, Artificial Sequence
  Cyclic GFR-binding peptide
SATSMLYYDNGRVLLLRKHRNDKQQII

SEQ ID NO: 123578 - protein, 27 aa, Artificial Sequence
  Cyclic GFR-binding peptide
SPISMLYKDNGRVLLLKYHYNDKQQII

SEQ ID NO: 123579 - protein, 27 aa, Artificial Sequence
  Cyclic GFR-binding peptide
NAISVLYFDDSSNVILKKYRNDKQQII

SEQ ID NO: 123580 - protein, 27 aa, Artificial Sequence
  Cyclic GFR-binding peptide
SATSILYYDENKNVVLRKHRNDKQQII

SEQ ID NO: 123581 - protein, 27 aa, Artificial Sequence
  Cyclic GFR-binding peptide
SATSILYYIGKTPKILRKHRNDKQQII

SEQ ID NO: 123582 - protein, 27 aa, Artificial Sequence
  Cyclic GFR-binding peptide
SPINILYFDKGVVTYYGKIPNDKQQII

SEQ ID NO: 123583 - protein, 27 aa, Artificial Sequence
  Cyclic GFR-binding peptide
SPISVLYKDDMGVPTLKYHYNDKQQII

SEQ ID NO: 123584 - protein, 27 aa, Artificial Sequence
  Cyclic GFR-binding peptide
SATSVLYYDSSNNVILRKHRNDKQQII

SEQ ID NO: 123585 - protein, 27 aa, Artificial Sequence
  Cyclic GFR-binding peptide
NAISMLYFDNGRVLLLKKYRNDKQQII

SEQ ID NO: 123586 - protein, 27 aa, Artificial Sequence
  Cyclic GFR-binding peptide
SPISILYKVGRTPKVLKYHYNDKQQII

SEQ ID NO: 123587 - protein, 27 aa, Artificial Sequence
  Cyclic GFR-binding peptide
SATSVLYYDDSSNVILRKHRNDKQQII

SEQ ID NO: 123588 - protein, 27 aa, Artificial Sequence
  Cyclic GFR-binding peptide
SPINMLYFDNGRVLLYGKIPNDKQQII

SEQ ID NO: 123589 - protein, 27 aa, Artificial Sequence
  Cyclic GFR-binding peptide
NAISILYFDENKNVVLKKYRNDKQQII

SEQ ID NO: 123590 - protein, 27 aa, Artificial Sequence
  Cyclic GFR-binding peptide
EPISMLYLDEYDKVVKFKYENDKQQII

SEQ ID NO: 123591 - protein, 27 aa, Artificial Sequence
  Cyclic GFR-binding peptide
SPINILYFDENKNVVYGKIPNDKQQII

SEQ ID NO: 123592 - protein, 27 aa, Artificial Sequence
  Cyclic GFR-binding peptide
SPINILYFIGKTPKIYGKIPNDKQQII

SEQ ID NO: 123593 - protein, 27 aa, Artificial Sequence
  Cyclic GFR-binding peptide
EPISILYLDAANNVVKFKYENDKQQII

SEQ ID NO: 123594 - protein, 27 aa, Artificial Sequence
  Cyclic GFR-binding peptide
SATSILYYDKGVVTYLRKHRNDKQQII

SEQ ID NO: 123595 - protein, 27 aa, Artificial Sequence
  Cyclic GFR-binding peptide
NAISILYFIGKTPKILKKYRNDKQQII

SEQ ID NO: 123596 - protein, 27 aa, Artificial Sequence
  Cyclic GFR-binding peptide
SPINMLYFDEYDKVVYGKIPNDKQQII

SEQ ID NO: 123597 - protein, 27 aa, Artificial Sequence
  Cyclic GFR-binding peptide
EPISILYLDSANNVVKFKYENDKQQII

SEQ ID NO: 123598 - protein, 27 aa, Artificial Sequence
  Cyclic GFR-binding peptide
NAISILYFVGRTPKVLKKYRNDKQQII

SEQ ID NO: 123599 - protein, 27 aa, Artificial Sequence
  Cyclic GFR-binding peptide
SATSMLYYDENEKVVLRKHRNDKQQII

SEQ ID NO: 123600 - protein, 27 aa, Artificial Sequence
  Cyclic GFR-binding peptide
SPISILYKIGKTPKILKYHYNDKQQII

SEQ ID NO: 123601 - protein, 27 aa, Artificial Sequence
  Cyclic GFR-binding peptide
SPISMLYKDENEKVVLKYHYNDKQQII

SEQ ID NO: 123602 - protein, 27 aa, Artificial Sequence
  Cyclic GFR-binding peptide
SATSMLYYNDKQQIILRKHRNDKQQII

SEQ ID NO: 123603 - protein, 27 aa, Artificial Sequence
  Cyclic GFR-binding peptide
NAISMLYFDENEKVVLKKYRNDKQQII

SEQ ID NO: 123604 - protein, 27 aa, Artificial Sequence
  Cyclic GFR-binding peptide
NAISILYFDAANNVVLKKYRNDKQQII

SEQ ID NO: 123605 - protein, 27 aa, Artificial Sequence
  Cyclic GFR-binding peptide
EPISMLYLNDKQQIIKFKYENDKQQII

SEQ ID NO: 123606 - protein, 27 aa, Artificial Sequence
  Cyclic GFR-binding peptide
NAISVLYFDDMGVPTLKKYRNDKQQII

SEQ ID NO: 123607 - protein, 27 aa, Artificial Sequence
  Cyclic GFR-binding peptide
SPISILYKDAANNVVLKYHYNDKQQII

SEQ ID NO: 123608 - protein, 27 aa, Artificial Sequence
  Cyclic GFR-binding peptide
SPINVLYFDSSNNVIYGKIPNDKQQII

SEQ ID NO: 123609 - protein, 27 aa, Artificial Sequence
  Cyclic GFR-binding peptide
SPINILYFVGRKPKVYGKIPNDKQQII

SEQ ID NO: 123610 - protein, 27 aa, Artificial Sequence
  Cyclic GFR-binding peptide
NAISMLYFNDKQQIILKKYRNDKQQII

SEQ ID NO: 123611 - protein, 27 aa, Artificial Sequence
  Cyclic GFR-binding peptide
SPINMLYFNDKQQIIYGKIPNDKQQII

SEQ ID NO: 123612 - protein, 27 aa, Artificial Sequence
  Cyclic GFR-binding peptide
NAISVLYFDSSNNVILKKYRNDKQQII

SEQ ID NO: 123613 - protein, 27 aa, Artificial Sequence
  Cyclic GFR-binding peptide
SPINILYFDAANNVVYGKIPNDKQQII

SEQ ID NO: 123614 - protein, 27 aa, Artificial Sequence
  Cyclic GFR-binding peptide
SATSILYYVGRTPKVLRKHRNDKQQII

SEQ ID NO: 123615 - protein, 27 aa, Artificial Sequence
  Cyclic GFR-binding peptide
EPISVLYLDSSNNVIKFKYENDKQQII

SEQ ID NO: 123616 - protein, 27 aa, Artificial Sequence
  Cyclic GFR-binding peptide
SATSILYYDSANNVVLRKHRNDKQQII

SEQ ID NO: 123617 - protein, 27 aa, Artificial Sequence
  Cyclic GFR-binding peptide
SATSVLYYDDMGVPTLRKHRNDKQQII

SEQ ID NO: 123618 - protein, 27 aa, Artificial Sequence
  Cyclic GFR-binding peptide
SPISVLYKDSSNNVILKYHYNDKQQII

SEQ ID NO: 123619 - protein, 27 aa, Artificial Sequence
  Cyclic GFR-binding peptide
SPISILYKDSANNVVLKYHYNDKQQII

SEQ ID NO: 123620 - protein, 27 aa, Artificial Sequence
  Cyclic GFR-binding peptide
EPISVLYLDDSSNVIKFKYENDKQQII

SEQ ID NO: 123621 - protein, 27 aa, Artificial Sequence
  Cyclic GFR-binding peptide
EPISILYLVGRKPKVKFKYENDKQQII

SEQ ID NO: 123622 - protein, 27 aa, Artificial Sequence
  Cyclic GFR-binding peptide
SATSMLYYDEYDKVVLRKHRNDKQQII

SEQ ID NO: 123623 - protein, 27 aa, Artificial Sequence
  Cyclic GFR-binding peptide
EPISMLYLDENEKVVKFKYENDKQQII

SEQ ID NO: 123624 - protein, 27 aa, Artificial Sequence
  Cyclic GFR-binding peptide
EPISILYLDKGVVTYKFKYENDKQQII

SEQ ID NO: 123625 - protein, 27 aa, Artificial Sequence
  Cyclic GFR-binding peptide
SPINILYFDSANNVVYGKIPNDKQQII

SEQ ID NO: 123626 - protein, 27 aa, Artificial Sequence
  Cyclic GFR-binding peptide
SPISMLYKNDKQQIILKYHYNDKQQII

SEQ ID NO: 123627 - protein, 27 aa, Artificial Sequence
  Cyclic GFR-binding peptide
NAISILYFDSANNVVLKKYRNDKQQII

SEQ ID NO: 123628 - protein, 27 aa, Artificial Sequence
  Cyclic GFR-binding peptide
SATSILYYDAANNVVLRKHRNDKQQII

SEQ ID NO: 123629 - protein, 27 aa, Artificial Sequence
  Cyclic GFR-binding peptide
NDKQQIISMEGIIIQQKDNMIQMTINS

SEQ ID NO: 123630 - protein, 27 aa, Artificial Sequence
  Cyclic GFR-binding peptide
NDKQQIISMEGIIVNSSDDMIQVTINS

SEQ ID NO: 123631 - protein, 27 aa, Artificial Sequence
  Cyclic GFR-binding peptide
NDKQQIISMEGLVKPKRGVMIQITINS

SEQ ID NO: 123632 - protein, 27 aa, Artificial Sequence
  Cyclic GFR-binding peptide
NDKQQIISMEGLVVNNASDMIQITINS

SEQ ID NO: 123633 - protein, 29 aa, Artificial Sequence
  Cyclic GFR-binding peptide
NDKQQIISMEGIFIPKKRVIEMIQVTINS

SEQ ID NO: 123634 - protein, 27 aa, Artificial Sequence
  Cyclic GFR-binding peptide
NDKQQIISMEGILLVRGNDMIQMTINS

SEQ ID NO: 123635 - protein, 29 aa, Artificial Sequence
  Cyclic GFR-binding peptide
NDKQQIISMEGILKPKKRVYEMIQVTINS

SEQ ID NO: 123636 - protein, 27 aa, Artificial Sequence
  Cyclic GFR-binding peptide
NDKQQIISMEGLIKPTKGIMIQITINS

SEQ ID NO: 123637 - protein, 27 aa, Artificial Sequence
  Cyclic GFR-binding peptide
NDKQQIISMEGLIVNSSDDMIQVTINS

SEQ ID NO: 123638 - protein, 29 aa, Artificial Sequence
  Cyclic GFR-binding peptide
NDKQQIISMEGIHQGQHPKIRMIQMTINS

SEQ ID NO: 123639 - protein, 27 aa, Artificial Sequence
  Cyclic GFR-binding peptide
NDKQQIISMEGIVVNNASDMIQITINS

SEQ ID NO: 123640 - protein, 29 aa, Artificial Sequence
  Cyclic GFR-binding peptide
NDKQQIISMEGLLKPKKRVYEMIQVTINS

SEQ ID NO: 123641 - protein, 27 aa, Artificial Sequence
  Cyclic GFR-binding peptide
NDKQQIISMEGIVKPKRGVMIQITINS

SEQ ID NO: 123642 - protein, 27 aa, Artificial Sequence
  Cyclic GFR-binding peptide
NDKQQIISMEGIVKPTRGVMIQITINS

SEQ ID NO: 123643 - protein, 27 aa, Artificial Sequence
  Cyclic GFR-binding peptide
NDKQQIISMEGLVVNNAADMIQITINS

SEQ ID NO: 123644 - protein, 27 aa, Artificial Sequence
  Cyclic GFR-binding peptide
NDKQQIISMEGLLLVRGNDMIQMTINS

SEQ ID NO: 123645 - protein, 27 aa, Artificial Sequence
  Cyclic GFR-binding peptide
NDKQQIISMEGIIKPTKGIMIQITINS

SEQ ID NO: 123646 - protein, 27 aa, Artificial Sequence
  Cyclic GFR-binding peptide
NDKQQIISMEGLIIQQKDNMIQMTINS

SEQ ID NO: 123647 - protein, 29 aa, Artificial Sequence
  Cyclic GFR-binding peptide
NDKQQIISMEGLHQGQHPKIRMIQMTINS

SEQ ID NO: 123648 - protein, 27 aa, Artificial Sequence
  Cyclic GFR-binding peptide
NDKQQIISMEGIVVNNAADMIQITINS

SEQ ID NO: 123649 - protein, 29 aa, Artificial Sequence
  Cyclic GFR-binding peptide
NDKQQIISMEGLFIPKKRVIEMIQVTINS

SEQ ID NO: 123650 - protein, 27 aa, Artificial Sequence
  Cyclic GFR-binding peptide
NDKQQIISMEGLVKPTRGVMIQITINS

SEQ ID NO: 123651 - protein, 27 aa, Artificial Sequence
  Cyclic GFR-binding peptide
SNITMQIMNDKQQIIIGEMSNDKQQII

SEQ ID NO: 123652 - protein, 27 aa, Artificial Sequence
  Cyclic GFR-binding peptide
SNITVQIMDDSSNVIIGEMSNDKQQII

SEQ ID NO: 123653 - protein, 27 aa, Artificial Sequence
  Cyclic GFR-binding peptide
SNITIQIMVGRKPKVLGEMSNDKQQII

SEQ ID NO: 123654 - protein, 27 aa, Artificial Sequence
  Cyclic GFR-binding peptide
SNITIQIMDSANNVVLGEMSNDKQQII

SEQ ID NO: 123655 - protein, 29 aa, Artificial Sequence
  Cyclic GFR-binding peptide
SNITVQIMEIVRKKPIFIGEMSNDKQQII

SEQ ID NO: 123656 - protein, 27 aa, Artificial Sequence
  Cyclic GFR-binding peptide
SNITMQIMDNGRVLLIGEMSNDKQQII

SEQ ID NO: 123657 - protein, 29 aa, Artificial Sequence
  Cyclic GFR-binding peptide
SNITVQIMEYVRKKPKLIGEMSNDKQQII

SEQ ID NO: 123658 - protein, 27 aa, Artificial Sequence
  Cyclic GFR-binding peptide
SNITIQIMIGKTPKILGEMSNDKQQII

SEQ ID NO: 123659 - protein, 27 aa, Artificial Sequence
  Cyclic GFR-binding peptide
SNITVQIMDDSSNVILGEMSNDKQQII

SEQ ID NO: 123660 - protein, 29 aa, Artificial Sequence
  Cyclic GFR-binding peptide
SNITMQIMRIKPHQGQHIGEMSNDKQQII

SEQ ID NO: 123661 - protein, 27 aa, Artificial Sequence
  Cyclic GFR-binding peptide
SNITIQIMDSANNVVIGEMSNDKQQII

SEQ ID NO: 123662 - protein, 29 aa, Artificial Sequence
  Cyclic GFR-binding peptide
SNITVQIMEYVRKKPKLLGEMSNDKQQII

SEQ ID NO: 123663 - protein, 27 aa, Artificial Sequence
  Cyclic GFR-binding peptide
SNITIQIMVGRKPKVIGEMSNDKQQII

SEQ ID NO: 123664 - protein, 27 aa, Artificial Sequence
  Cyclic GFR-binding peptide
SNITIQIMVGRTPKVIGEMSNDKQQII

SEQ ID NO: 123665 - protein, 27 aa, Artificial Sequence
  Cyclic GFR-binding peptide
SNITIQIMDAANNVVLGEMSNDKQQII

SEQ ID NO: 123666 - protein, 27 aa, Artificial Sequence
  Cyclic GFR-binding peptide
SNITMQIMDNGRVLLLGEMSNDKQQII

SEQ ID NO: 123667 - protein, 27 aa, Artificial Sequence
  Cyclic GFR-binding peptide
SNITIQIMIGKTPKIIGEMSNDKQQII

SEQ ID NO: 123668 - protein, 27 aa, Artificial Sequence
  Cyclic GFR-binding peptide
SNITMQIMNDKQQIILGEMSNDKQQII

SEQ ID NO: 123669 - protein, 29 aa, Artificial Sequence
  Cyclic GFR-binding peptide
SNITMQIMRIKPHQGQHLGEMSNDKQQII

SEQ ID NO: 123670 - protein, 27 aa, Artificial Sequence
  Cyclic GFR-binding peptide
SNITIQIMDAANNVVIGEMSNDKQQII

SEQ ID NO: 123671 - protein, 29 aa, Artificial Sequence
  Cyclic GFR-binding peptide
SNITVQIMEIVRKKPIFLGEMSNDKQQII

SEQ ID NO: 123672 - protein, 27 aa, Artificial Sequence
  Cyclic GFR-binding peptide
SNITIQIMVGRTPKVLGEMSNDKQQII

SEQ ID NO: 123673 - protein, 27 aa, Artificial Sequence
  Cyclic GFR-binding peptide
NDKQQIIRYKKLIKPTKGIFYLISIAN

SEQ ID NO: 123674 - protein, 27 aa, Artificial Sequence
  Cyclic GFR-binding peptide
NDKQQIIQYNKLVVNKNEDLYLISIAS

SEQ ID NO: 123675 - protein, 27 aa, Artificial Sequence
  Cyclic GFR-binding peptide
NDKQQIIQYNKLVVNNAADLYLISIAS

SEQ ID NO: 123676 - protein, 27 aa, Artificial Sequence
  Cyclic GFR-binding peptide
NDKQQIIQYNKLIVNNSSDLYLVSIAS

SEQ ID NO: 123677 - protein, 27 aa, Artificial Sequence
  Cyclic GFR-binding peptide
NDKQQIIRYKKLVVKDYEDFYLMSIAN

SEQ ID NO: 123678 - protein, 27 aa, Artificial Sequence
  Cyclic GFR-binding peptide
NDKQQIIRYKKLVKPTRGVFYLISIAN

SEQ ID NO: 123679 - protein, 27 aa, Artificial Sequence
  Cyclic GFR-binding peptide
NDKQQIIQYNKLIIQQKDNLYLMSIAS

SEQ ID NO: 123680 - protein, 27 aa, Artificial Sequence
  Cyclic GFR-binding peptide
NDKQQIIQYNKLLLVRGNDLYLMSIAS

SEQ ID NO: 123681 - protein, 27 aa, Artificial Sequence
  Cyclic GFR-binding peptide
NDKQQIIQYNKLVKPTRGVLYLISIAS

SEQ ID NO: 123682 - protein, 27 aa, Artificial Sequence
  Cyclic GFR-binding peptide
NDKQQIIRYKKLVVKENEDFYLMSIAN

SEQ ID NO: 123683 - protein, 27 aa, Artificial Sequence
  Cyclic GFR-binding peptide
NDKQQIIRYKKLVVNNAADFYLISIAN

SEQ ID NO: 123684 - protein, 27 aa, Artificial Sequence
  Cyclic GFR-binding peptide
NDKQQIIQYNKLTPVGMDDLYLVSIAS

SEQ ID NO: 123685 - protein, 27 aa, Artificial Sequence
  Cyclic GFR-binding peptide
NDKQQIIRYKKLTPVGMDDFYLVSIAN

SEQ ID NO: 123686 - protein, 27 aa, Artificial Sequence
  Cyclic GFR-binding peptide
NDKQQIIRYKKLVKPKRGVFYLISIAN

SEQ ID NO: 123687 - protein, 27 aa, Artificial Sequence
  Cyclic GFR-binding peptide
NDKQQIIQYNKLVVKENEDLYLMSIAS

SEQ ID NO: 123688 - protein, 27 aa, Artificial Sequence
  Cyclic GFR-binding peptide
NDKQQIIRYKKLIIQQKDNFYLMSIAN

SEQ ID NO: 123689 - protein, 27 aa, Artificial Sequence
  Cyclic GFR-binding peptide
NDKQQIIQYNKLVKPKRGVLYLISIAS

SEQ ID NO: 123690 - protein, 27 aa, Artificial Sequence
  Cyclic GFR-binding peptide
NDKQQIIRYKKLIVNNSSDFYLVSIAN

SEQ ID NO: 123691 - protein, 27 aa, Artificial Sequence
  Cyclic GFR-binding peptide
NDKQQIIRYKKLYTVVGKDFYLISIAN

SEQ ID NO: 123692 - protein, 27 aa, Artificial Sequence
  Cyclic GFR-binding peptide
NDKQQIIRYKKLIVNSSDDFYLVSIAN

SEQ ID NO: 123693 - protein, 27 aa, Artificial Sequence
  Cyclic GFR-binding peptide
NDKQQIIRYKKLLLVRGNDFYLMSIAN

SEQ ID NO: 123694 - protein, 27 aa, Artificial Sequence
  Cyclic GFR-binding peptide
NDKQQIIQYNKLVVNNASDLYLISIAS

SEQ ID NO: 123695 - protein, 27 aa, Artificial Sequence
  Cyclic GFR-binding peptide
NDKQQIIQYNKLIKPTKGILYLISIAS

SEQ ID NO: 123696 - protein, 27 aa, Artificial Sequence
  Cyclic GFR-binding peptide
NDKQQIIRYKKLVVNKNEDFYLISIAN

SEQ ID NO: 123697 - protein, 27 aa, Artificial Sequence
  Cyclic GFR-binding peptide
NDKQQIIQYNKLYTVVGKDLYLISIAS

SEQ ID NO: 123698 - protein, 27 aa, Artificial Sequence
  Cyclic GFR-binding peptide
NDKQQIIQYNKLVVKDYEDLYLMSIAS

SEQ ID NO: 123699 - protein, 27 aa, Artificial Sequence
  Cyclic GFR-binding peptide
NDKQQIIRYKKLVVNNASDFYLISIAN

SEQ ID NO: 123700 - protein, 27 aa, Artificial Sequence
  Cyclic GFR-binding peptide
NDKQQIIQYNKLIVNSSDDLYLVSIAS

SEQ ID NO: 123701 - protein, 27 aa, Artificial Sequence
  Cyclic GFR-binding peptide
NAISILYFIGKTPKILKKYRNDKQQII

SEQ ID NO: 123702 - protein, 27 aa, Artificial Sequence
  Cyclic GFR-binding peptide
SAISILYLDENKNVVLKNYQNDKQQII

SEQ ID NO: 123703 - protein, 27 aa, Artificial Sequence
  Cyclic GFR-binding peptide
SAISILYLDAANNVVLKNYQNDKQQII

SEQ ID NO: 123704 - protein, 27 aa, Artificial Sequence
  Cyclic GFR-binding peptide
SAISVLYLDSSNNVILKNYQNDKQQII

SEQ ID NO: 123705 - protein, 27 aa, Artificial Sequence
  Cyclic GFR-binding peptide
NAISMLYFDEYDKVVLKKYRNDKQQII

SEQ ID NO: 123706 - protein, 27 aa, Artificial Sequence
  Cyclic GFR-binding peptide
NAISILYFVGRTPKVLKKYRNDKQQII

SEQ ID NO: 123707 - protein, 27 aa, Artificial Sequence
  Cyclic GFR-binding peptide
SAISMLYLNDKQQIILKNYQNDKQQII

SEQ ID NO: 123708 - protein, 27 aa, Artificial Sequence
  Cyclic GFR-binding peptide
SAISMLYLDNGRVLLLKNYQNDKQQII

SEQ ID NO: 123709 - protein, 27 aa, Artificial Sequence
  Cyclic GFR-binding peptide
SAISILYLVGRTPKVLKNYQNDKQQII

SEQ ID NO: 123710 - protein, 27 aa, Artificial Sequence
  Cyclic GFR-binding peptide
NAISMLYFDENEKVVLKKYRNDKQQII

SEQ ID NO: 123711 - protein, 27 aa, Artificial Sequence
  Cyclic GFR-binding peptide
NAISILYFDAANNVVLKKYRNDKQQII

SEQ ID NO: 123712 - protein, 27 aa, Artificial Sequence
  Cyclic GFR-binding peptide
SAISVLYLDDMGVPTLKNYQNDKQQII

SEQ ID NO: 123713 - protein, 27 aa, Artificial Sequence
  Cyclic GFR-binding peptide
NAISVLYFDDMGVPTLKKYRNDKQQII

SEQ ID NO: 123714 - protein, 27 aa, Artificial Sequence
  Cyclic GFR-binding peptide
NAISILYFVGRKPKVLKKYRNDKQQII

SEQ ID NO: 123715 - protein, 27 aa, Artificial Sequence
  Cyclic GFR-binding peptide
SAISMLYLDENEKVVLKNYQNDKQQII

SEQ ID NO: 123716 - protein, 27 aa, Artificial Sequence
  Cyclic GFR-binding peptide
NAISMLYFNDKQQIILKKYRNDKQQII

SEQ ID NO: 123717 - protein, 27 aa, Artificial Sequence
  Cyclic GFR-binding peptide
SAISILYLVGRKPKVLKNYQNDKQQII

SEQ ID NO: 123718 - protein, 27 aa, Artificial Sequence
  Cyclic GFR-binding peptide
NAISVLYFDSSNNVILKKYRNDKQQII

SEQ ID NO: 123719 - protein, 27 aa, Artificial Sequence
  Cyclic GFR-binding peptide
NAISILYFDKGVVTYLKKYRNDKQQII

SEQ ID NO: 123720 - protein, 27 aa, Artificial Sequence
  Cyclic GFR-binding peptide
NAISVLYFDDSSNVILKKYRNDKQQII

SEQ ID NO: 123721 - protein, 27 aa, Artificial Sequence
  Cyclic GFR-binding peptide
NAISMLYFDNGRVLLLKKYRNDKQQII

SEQ ID NO: 123722 - protein, 27 aa, Artificial Sequence
  Cyclic GFR-binding peptide
SAISILYLDSANNVVLKNYQNDKQQII

SEQ ID NO: 123723 - protein, 27 aa, Artificial Sequence
  Cyclic GFR-binding peptide
SAISILYLIGKTPKILKNYQNDKQQII

SEQ ID NO: 123724 - protein, 27 aa, Artificial Sequence
  Cyclic GFR-binding peptide
NAISILYFDENKNVVLKKYRNDKQQII

SEQ ID NO: 123725 - protein, 27 aa, Artificial Sequence
  Cyclic GFR-binding peptide
SAISILYLDKGVVTYLKNYQNDKQQII

SEQ ID NO: 123726 - protein, 27 aa, Artificial Sequence
  Cyclic GFR-binding peptide
SAISMLYLDEYDKVVLKNYQNDKQQII

SEQ ID NO: 123727 - protein, 27 aa, Artificial Sequence
  Cyclic GFR-binding peptide
NAISILYFDSANNVVLKKYRNDKQQII

SEQ ID NO: 123728 - protein, 27 aa, Artificial Sequence
  Cyclic GFR-binding peptide
SAISVLYLDDSSNVILKNYQNDKQQII

SEQ ID NO: 123729 - protein, 29 aa, Artificial Sequence
  Cyclic GFR-binding peptide
NDKQQIIVTAKKLKPKKRVYEIKRVQVPR

SEQ ID NO: 123730 - protein, 29 aa, Artificial Sequence
  Cyclic GFR-binding peptide
NDKQQIIVQVEKLKPKKRVYEVKAVKVSR

SEQ ID NO: 123731 - protein, 27 aa, Artificial Sequence
  Cyclic GFR-binding peptide
NDKQQIIVTAKKVKPTRGVIKRIQVPR

SEQ ID NO: 123732 - protein, 29 aa, Artificial Sequence
  Cyclic GFR-binding peptide
NDKQQIIVQVEKFIPKKRVIEVKAVKVSR

SEQ ID NO: 123733 - protein, 29 aa, Artificial Sequence
  Cyclic GFR-binding peptide
NDKQQIIVQVEKHQGQHPKIRVKAMKVSR

SEQ ID NO: 123734 - protein, 29 aa, Artificial Sequence
  Cyclic GFR-binding peptide
NDKQQIIVTAKKHQGQHPKIRIKRMQVPR

SEQ ID NO: 123735 - protein, 27 aa, Artificial Sequence
  Cyclic GFR-binding peptide
NDKQQIIVTAKKIKPTKGIIKRIQVPR

SEQ ID NO: 123736 - protein, 27 aa, Artificial Sequence
  Cyclic GFR-binding peptide
NDKQQIIVQVEKVKPKRGVVKAIKVSR

SEQ ID NO: 123737 - protein, 27 aa, Artificial Sequence
  Cyclic GFR-binding peptide
NDKQQIIVTAKKVKPKRGVIKRIQVPR

SEQ ID NO: 123738 - protein, 27 aa, Artificial Sequence
  Cyclic GFR-binding peptide
NDKQQIIVQVEKIKPTKGIVKAIKVSR

SEQ ID NO: 123739 - protein, 27 aa, Artificial Sequence
  Cyclic GFR-binding peptide
NDKQQIIVQVEKVKPTRGVVKAIKVSR

SEQ ID NO: 123740 - protein, 29 aa, Artificial Sequence
  Cyclic GFR-binding peptide
NDKQQIIVTAKKFIPKKRVIEIKRVQVPR

SEQ ID NO: 123741 - protein, 29 aa, Artificial Sequence
  Cyclic GFR-binding peptide
RPVQVRKIEYVRKKPKLKKATVNDKQQII

SEQ ID NO: 123742 - protein, 29 aa, Artificial Sequence
  Cyclic GFR-binding peptide
RSVKVAKVEYVRKKPKLKEVQVNDKQQII

SEQ ID NO: 123743 - protein, 27 aa, Artificial Sequence
  Cyclic GFR-binding peptide
RPVQIRKIVGRTPKVKKATVNDKQQII

SEQ ID NO: 123744 - protein, 29 aa, Artificial Sequence
  Cyclic GFR-binding peptide
RSVKVAKVEIVRKKPIFKEVQVNDKQQII

SEQ ID NO: 123745 - protein, 29 aa, Artificial Sequence
  Cyclic GFR-binding peptide
RSVKMAKVRIKPHQGQHKEVQVNDKQQII

SEQ ID NO: 123746 - protein, 29 aa, Artificial Sequence
  Cyclic GFR-binding peptide
RPVQMRKIRIKPHQGQHKKATVNDKQQII

SEQ ID NO: 123747 - protein, 27 aa, Artificial Sequence
  Cyclic GFR-binding peptide
RPVQIRKIIGKTPKIKKATVNDKQQII

SEQ ID NO: 123748 - protein, 27 aa, Artificial Sequence
  Cyclic GFR-binding peptide
RSVKIAKVVGRKPKVKEVQVNDKQQII

SEQ ID NO: 123749 - protein, 27 aa, Artificial Sequence
  Cyclic GFR-binding peptide
RPVQIRKIVGRKPKVKKATVNDKQQII

SEQ ID NO: 123750 - protein, 27 aa, Artificial Sequence
  Cyclic GFR-binding peptide
RSVKIAKVIGKTPKIKEVQVNDKQQII

SEQ ID NO: 123751 - protein, 27 aa, Artificial Sequence
  Cyclic GFR-binding peptide
RSVKIAKVVGRTPKVKEVQVNDKQQII

SEQ ID NO: 123752 - protein, 29 aa, Artificial Sequence
  Cyclic GFR-binding peptide
RPVQVRKIEIVRKKPIFKKATVNDKQQII

SEQ ID NO: 123753 - protein, 27 aa, Artificial Sequence
  Cyclic GFR-binding peptide
DAANNVVRYKKLIKPTKGIFYLISIAN

SEQ ID NO: 123754 - protein, 29 aa, Artificial Sequence
  Cyclic GFR-binding peptide
DAANNVVRHKRLFIPKKRVIEYYLVSTAS

SEQ ID NO: 123755 - protein, 27 aa, Artificial Sequence
  Cyclic GFR-binding peptide
DAANNVVYHYKLVVKDYEDKYLMSIPS

SEQ ID NO: 123756 - protein, 27 aa, Artificial Sequence
  Cyclic GFR-binding peptide
DAANNVVQYNKLIVNNSSDLYLVSIAS

SEQ ID NO: 123757 - protein, 27 aa, Artificial Sequence
  Cyclic GFR-binding peptide
DAANNVVRYKKLVVKDYEDFYLMSIAN

SEQ ID NO: 123758 - protein, 27 aa, Artificial Sequence
  Cyclic GFR-binding peptide
DAANNVVRYKKLVKPTRGVFYLISIAN

SEQ ID NO: 123759 - protein, 27 aa, Artificial Sequence
  Cyclic GFR-binding peptide
DAANNVVRHKRLVVKENEDYYLMSTAS

SEQ ID NO: 123760 - protein, 27 aa, Artificial Sequence
  Cyclic GFR-binding peptide
DAANNVVYHYKLIKPTKGIKYLISIPS

SEQ ID NO: 123761 - protein, 29 aa, Artificial Sequence
  Cyclic GFR-binding peptide
DAANNVVRYKKLFIPKKRVIEFYLVSIAN

SEQ ID NO: 123762 - protein, 27 aa, Artificial Sequence
  Cyclic GFR-binding peptide
DAANNVVYHYKLVVKENEDKYLMSIPS

SEQ ID NO: 123763 - protein, 27 aa, Artificial Sequence
  Cyclic GFR-binding peptide
DAANNVVRHKRLVKPKRGVYYLISTAS

SEQ ID NO: 123764 - protein, 27 aa, Artificial Sequence
  Cyclic GFR-binding peptide
DAANNVVYHYKLVKPKRGVKYLISIPS

SEQ ID NO: 123765 - protein, 29 aa, Artificial Sequence
  Cyclic GFR-binding peptide
DAANNVVQYNKLFIPKKRVIELYLVSIAS

SEQ ID NO: 123766 - protein, 27 aa, Artificial Sequence
  Cyclic GFR-binding peptide
DAANNVVQYNKLVKPTRGVLYLISIAS

SEQ ID NO: 123767 - protein, 27 aa, Artificial Sequence
  Cyclic GFR-binding peptide
DAANNVVRYKKLVVKENEDFYLMSIAN

SEQ ID NO: 123768 - protein, 27 aa, Artificial Sequence
  Cyclic GFR-binding peptide
DAANNVVQYNKLTPVGMDDLYLVSIAS

SEQ ID NO: 123769 - protein, 27 aa, Artificial Sequence
  Cyclic GFR-binding peptide
DAANNVVRYKKLTPVGMDDFYLVSIAN

SEQ ID NO: 123770 - protein, 27 aa, Artificial Sequence
  Cyclic GFR-binding peptide
DAANNVVRYKKLVKPKRGVFYLISIAN

SEQ ID NO: 123771 - protein, 27 aa, Artificial Sequence
  Cyclic GFR-binding peptide
DAANNVVQYNKLVVKENEDLYLMSIAS

SEQ ID NO: 123772 - protein, 27 aa, Artificial Sequence
  Cyclic GFR-binding peptide
DAANNVVYHYKLIVNSSDDKYLVSIPS

SEQ ID NO: 123773 - protein, 27 aa, Artificial Sequence
  Cyclic GFR-binding peptide
DAANNVVQYNKLVKPKRGVLYLISIAS

SEQ ID NO: 123774 - protein, 27 aa, Artificial Sequence
  Cyclic GFR-binding peptide
DAANNVVRYKKLIVNNSSDFYLVSIAN

SEQ ID NO: 123775 - protein, 27 aa, Artificial Sequence
  Cyclic GFR-binding peptide
DAANNVVRYKKLIVNSSDDFYLVSIAN

SEQ ID NO: 123776 - protein, 27 aa, Artificial Sequence
  Cyclic GFR-binding peptide
DAANNVVRHKRLVKPTRGVYYLISTAS

SEQ ID NO: 123777 - protein, 29 aa, Artificial Sequence
  Cyclic GFR-binding peptide
DAANNVVYHYKLFIPKKRVIEKYLVSIPS

SEQ ID NO: 123778 - protein, 27 aa, Artificial Sequence
  Cyclic GFR-binding peptide
DAANNVVRHKRLIKPTKGIYYLISTAS

SEQ ID NO: 123779 - protein, 27 aa, Artificial Sequence
  Cyclic GFR-binding peptide
DAANNVVRHKRLTPVGMDDYYLVSTAS

SEQ ID NO: 123780 - protein, 27 aa, Artificial Sequence
  Cyclic GFR-binding peptide
DAANNVVYHYKLTPVGMDDKYLVSIPS

SEQ ID NO: 123781 - protein, 27 aa, Artificial Sequence
  Cyclic GFR-binding peptide
DAANNVVYHYKLIVNNSSDKYLVSIPS

SEQ ID NO: 123782 - protein, 27 aa, Artificial Sequence
  Cyclic GFR-binding peptide
DAANNVVRHKRLIVNNSSDYYLVSTAS

SEQ ID NO: 123783 - protein, 27 aa, Artificial Sequence
  Cyclic GFR-binding peptide
DAANNVVYHYKLVKPTRGVKYLISIPS

SEQ ID NO: 123784 - protein, 27 aa, Artificial Sequence
  Cyclic GFR-binding peptide
DAANNVVRHKRLIVNSSDDYYLVSTAS

SEQ ID NO: 123785 - protein, 27 aa, Artificial Sequence
  Cyclic GFR-binding peptide
DAANNVVRHKRLVVKDYEDYYLMSTAS

SEQ ID NO: 123786 - protein, 27 aa, Artificial Sequence
  Cyclic GFR-binding peptide
DAANNVVQYNKLIKPTKGILYLISIAS

SEQ ID NO: 123787 - protein, 27 aa, Artificial Sequence
  Cyclic GFR-binding peptide
DAANNVVQYNKLVVKDYEDLYLMSIAS

SEQ ID NO: 123788 - protein, 27 aa, Artificial Sequence
  Cyclic GFR-binding peptide
DAANNVVQYNKLIVNSSDDLYLVSIAS

SEQ ID NO: 123789 - protein, 27 aa, Artificial Sequence
  Cyclic GFR-binding peptide
NAISILYFIGKTPKILKKYRDAANNVV

SEQ ID NO: 123790 - protein, 29 aa, Artificial Sequence
  Cyclic GFR-binding peptide
SATSVLYYEIVRKKPIFLRKHRDAANNVV

SEQ ID NO: 123791 - protein, 27 aa, Artificial Sequence
  Cyclic GFR-binding peptide
SPISMLYKDEYDKVVLKYHYDAANNVV

SEQ ID NO: 123792 - protein, 27 aa, Artificial Sequence
  Cyclic GFR-binding peptide
SAISVLYLDSSNNVILKNYQDAANNVV

SEQ ID NO: 123793 - protein, 27 aa, Artificial Sequence
  Cyclic GFR-binding peptide
NAISMLYFDEYDKVVLKKYRDAANNVV

SEQ ID NO: 123794 - protein, 27 aa, Artificial Sequence
  Cyclic GFR-binding peptide
NAISILYFVGRTPKVLKKYRDAANNVV

SEQ ID NO: 123795 - protein, 27 aa, Artificial Sequence
  Cyclic GFR-binding peptide
SATSMLYYDENEKVVLRKHRDAANNVV

SEQ ID NO: 123796 - protein, 27 aa, Artificial Sequence
  Cyclic GFR-binding peptide
SPISILYKIGKTPKILKYHYDAANNVV

SEQ ID NO: 123797 - protein, 29 aa, Artificial Sequence
  Cyclic GFR-binding peptide
NAISVLYFEIVRKKPIFLKKYRDAANNVV

SEQ ID NO: 123798 - protein, 27 aa, Artificial Sequence
  Cyclic GFR-binding peptide
SPISMLYKDENEKVVLKYHYDAANNVV

SEQ ID NO: 123799 - protein, 27 aa, Artificial Sequence
  Cyclic GFR-binding peptide
SATSILYYVGRKPKVLRKHRDAANNVV

SEQ ID NO: 123800 - protein, 27 aa, Artificial Sequence
  Cyclic GFR-binding peptide
SPISILYKVGRKPKVLKYHYDAANNVV

SEQ ID NO: 123801 - protein, 29 aa, Artificial Sequence
  Cyclic GFR-binding peptide
SAISVLYLEIVRKKPIFLKNYQDAANNVV

SEQ ID NO: 123802 - protein, 27 aa, Artificial Sequence
  Cyclic GFR-binding peptide
SAISILYLVGRTPKVLKNYQDAANNVV

SEQ ID NO: 123803 - protein, 27 aa, Artificial Sequence
  Cyclic GFR-binding peptide
NAISMLYFDENEKVVLKKYRDAANNVV

SEQ ID NO: 123804 - protein, 27 aa, Artificial Sequence
  Cyclic GFR-binding peptide
SAISVLYLDDMGVPTLKNYQDAANNVV

SEQ ID NO: 123805 - protein, 27 aa, Artificial Sequence
  Cyclic GFR-binding peptide
NAISVLYFDDMGVPTLKKYRDAANNVV

SEQ ID NO: 123806 - protein, 27 aa, Artificial Sequence
  Cyclic GFR-binding peptide
NAISILYFVGRKPKVLKKYRDAANNVV

SEQ ID NO: 123807 - protein, 27 aa, Artificial Sequence
  Cyclic GFR-binding peptide
SAISMLYLDENEKVVLKNYQDAANNVV

SEQ ID NO: 123808 - protein, 27 aa, Artificial Sequence
  Cyclic GFR-binding peptide
SPISVLYKDDSSNVILKYHYDAANNVV

SEQ ID NO: 123809 - protein, 27 aa, Artificial Sequence
  Cyclic GFR-binding peptide
SAISILYLVGRKPKVLKNYQDAANNVV

SEQ ID NO: 123810 - protein, 27 aa, Artificial Sequence
  Cyclic GFR-binding peptide
NAISVLYFDSSNNVILKKYRDAANNVV

SEQ ID NO: 123811 - protein, 27 aa, Artificial Sequence
  Cyclic GFR-binding peptide
NAISVLYFDDSSNVILKKYRDAANNVV

SEQ ID NO: 123812 - protein, 27 aa, Artificial Sequence
  Cyclic GFR-binding peptide
SATSILYYVGRTPKVLRKHRDAANNVV

SEQ ID NO: 123813 - protein, 29 aa, Artificial Sequence
  Cyclic GFR-binding peptide
SPISVLYKEIVRKKPIFLKYHYDAANNVV

SEQ ID NO: 123814 - protein, 27 aa, Artificial Sequence
  Cyclic GFR-binding peptide
SATSILYYIGKTPKILRKHRDAANNVV

SEQ ID NO: 123815 - protein, 27 aa, Artificial Sequence
  Cyclic GFR-binding peptide
SATSVLYYDDMGVPTLRKHRDAANNVV

SEQ ID NO: 123816 - protein, 27 aa, Artificial Sequence
  Cyclic GFR-binding peptide
SPISVLYKDDMGVPTLKYHYDAANNVV

SEQ ID NO: 123817 - protein, 27 aa, Artificial Sequence
  Cyclic GFR-binding peptide
SPISVLYKDSSNNVILKYHYDAANNVV

SEQ ID NO: 123818 - protein, 27 aa, Artificial Sequence
  Cyclic GFR-binding peptide
SATSVLYYDSSNNVILRKHRDAANNVV

SEQ ID NO: 123819 - protein, 27 aa, Artificial Sequence
  Cyclic GFR-binding peptide
SPISILYKVGRTPKVLKYHYDAANNVV

SEQ ID NO: 123820 - protein, 27 aa, Artificial Sequence
  Cyclic GFR-binding peptide
SATSVLYYDDSSNVILRKHRDAANNVV

SEQ ID NO: 123821 - protein, 27 aa, Artificial Sequence
  Cyclic GFR-binding peptide
SATSMLYYDEYDKVVLRKHRDAANNVV

SEQ ID NO: 123822 - protein, 27 aa, Artificial Sequence
  Cyclic GFR-binding peptide
SAISILYLIGKTPKILKNYQDAANNVV

SEQ ID NO: 123823 - protein, 27 aa, Artificial Sequence
  Cyclic GFR-binding peptide
SAISMLYLDEYDKVVLKNYQDAANNVV

SEQ ID NO: 123824 - protein, 27 aa, Artificial Sequence
  Cyclic GFR-binding peptide
SAISVLYLDDSSNVILKNYQDAANNVV

SEQ ID NO: 123825 - protein, 27 aa, Artificial Sequence
  Cyclic GFR-binding peptide
DAANNVVRYKKLIKPTKGIFYLISIAN

SEQ ID NO: 123826 - protein, 27 aa, Artificial Sequence
  Cyclic GFR-binding peptide
DAANNVVNSLQEVVKDYEDYYLMTLPE

SEQ ID NO: 123827 - protein, 27 aa, Artificial Sequence
  Cyclic GFR-binding peptide
DAANNVVNSLQEIKPTKGIYYVIPLPE

SEQ ID NO: 123828 - protein, 27 aa, Artificial Sequence
  Cyclic GFR-binding peptide
DAANNVVNSLQEVKPKRGVYYLITLPE

SEQ ID NO: 123829 - protein, 27 aa, Artificial Sequence
  Cyclic GFR-binding peptide
DAANNVVNSLQEVKPTRGVYYVIPLPE

SEQ ID NO: 123830 - protein, 27 aa, Artificial Sequence
  Cyclic GFR-binding peptide
DAANNVVRYKKLVVKDYEDFYLMSIAN

SEQ ID NO: 123831 - protein, 27 aa, Artificial Sequence
  Cyclic GFR-binding peptide
DAANNVVEYQKYIVNSSDDIFLVSIPS

SEQ ID NO: 123832 - protein, 27 aa, Artificial Sequence
  Cyclic GFR-binding peptide
DAANNVVEYQKYVKPTRGVIFLISIPS

SEQ ID NO: 123833 - protein, 27 aa, Artificial Sequence
  Cyclic GFR-binding peptide
DAANNVVNSLQEVVKENEDYYLMTLPE

SEQ ID NO: 123834 - protein, 27 aa, Artificial Sequence
  Cyclic GFR-binding peptide
DAANNVVRYKKLVKPTRGVFYLISIAN

SEQ ID NO: 123835 - protein, 27 aa, Artificial Sequence
  Cyclic GFR-binding peptide
DAANNVVNSLQEVVNNASDYYLITLPE

SEQ ID NO: 123836 - protein, 27 aa, Artificial Sequence
  Cyclic GFR-binding peptide
DAANNVVNSLQEVKPKRGVYYVIPLPE

SEQ ID NO: 123837 - protein, 27 aa, Artificial Sequence
  Cyclic GFR-binding peptide
DAANNVVNSLQEVVNNASDYYVIPLPE

SEQ ID NO: 123838 - protein, 27 aa, Artificial Sequence
  Cyclic GFR-binding peptide
DAANNVVNSLQEVKPTRGVYYLITLPE

SEQ ID NO: 123839 - protein, 27 aa, Artificial Sequence
  Cyclic GFR-binding peptide
DAANNVVQYNKLVKPTRGVLYLISIAS

SEQ ID NO: 123840 - protein, 27 aa, Artificial Sequence
  Cyclic GFR-binding peptide
DAANNVVRYKKLVVKENEDFYLMSIAN

SEQ ID NO: 123841 - protein, 27 aa, Artificial Sequence
  Cyclic GFR-binding peptide
DAANNVVEYQKYIKPTKGIIFLISIPS

SEQ ID NO: 123842 - protein, 27 aa, Artificial Sequence
  Cyclic GFR-binding peptide
DAANNVVEYQKYVVNNASDIFLISIPS

SEQ ID NO: 123843 - protein, 27 aa, Artificial Sequence
  Cyclic GFR-binding peptide
DAANNVVRYKKLVKPKRGVFYLISIAN

SEQ ID NO: 123844 - protein, 27 aa, Artificial Sequence
  Cyclic GFR-binding peptide
DAANNVVNSLQEIVNSSDDYYVVPLPE

SEQ ID NO: 123845 - protein, 27 aa, Artificial Sequence
  Cyclic GFR-binding peptide
DAANNVVNSLQEVVKDYEDYYVMPLPE

SEQ ID NO: 123846 - protein, 27 aa, Artificial Sequence
  Cyclic GFR-binding peptide
DAANNVVQYNKLVVKENEDLYLMSIAS

SEQ ID NO: 123847 - protein, 27 aa, Artificial Sequence
  Cyclic GFR-binding peptide
DAANNVVEYQKYVVKENEDIFLMSIPS

SEQ ID NO: 123848 - protein, 27 aa, Artificial Sequence
  Cyclic GFR-binding peptide
DAANNVVQYNKLVKPKRGVLYLISIAS

SEQ ID NO: 123849 - protein, 27 aa, Artificial Sequence
  Cyclic GFR-binding peptide
DAANNVVRYKKLIVNSSDDFYLVSIAN

SEQ ID NO: 123850 - protein, 27 aa, Artificial Sequence
  Cyclic GFR-binding peptide
DAANNVVNSLQEVVKENEDYYVMPLPE

SEQ ID NO: 123851 - protein, 27 aa, Artificial Sequence
  Cyclic GFR-binding peptide
DAANNVVEYQKYVVKDYEDIFLMSIPS

SEQ ID NO: 123852 - protein, 27 aa, Artificial Sequence
  Cyclic GFR-binding peptide
DAANNVVQYNKLVVNNASDLYLISIAS

SEQ ID NO: 123853 - protein, 27 aa, Artificial Sequence
  Cyclic GFR-binding peptide
DAANNVVQYNKLIKPTKGILYLISIAS

SEQ ID NO: 123854 - protein, 27 aa, Artificial Sequence
  Cyclic GFR-binding peptide
DAANNVVNSLQEIKPTKGIYYLITLPE

SEQ ID NO: 123855 - protein, 27 aa, Artificial Sequence
  Cyclic GFR-binding peptide
DAANNVVEYQKYVKPKRGVIFLISIPS

SEQ ID NO: 123856 - protein, 27 aa, Artificial Sequence
  Cyclic GFR-binding peptide
DAANNVVQYNKLVVKDYEDLYLMSIAS

SEQ ID NO: 123857 - protein, 27 aa, Artificial Sequence
  Cyclic GFR-binding peptide
DAANNVVRYKKLVVNNASDFYLISIAN

SEQ ID NO: 123858 - protein, 27 aa, Artificial Sequence
  Cyclic GFR-binding peptide
DAANNVVNSLQEIVNSSDDYYLVTLPE

SEQ ID NO: 123859 - protein, 27 aa, Artificial Sequence
  Cyclic GFR-binding peptide
DAANNVVQYNKLIVNSSDDLYLVSIAS

SEQ ID NO: 123860 - protein, 27 aa, Artificial Sequence
  Cyclic GFR-binding peptide
NAISILYFIGKTPKILKKYRDAANNVV

SEQ ID NO: 123861 - protein, 27 aa, Artificial Sequence
  Cyclic GFR-binding peptide
EPLTMLYYDEYDKVVEQLSNDAANNVV

SEQ ID NO: 123862 - protein, 27 aa, Artificial Sequence
  Cyclic GFR-binding peptide
EPLPIVYYIGKTPKIEQLSNDAANNVV

SEQ ID NO: 123863 - protein, 27 aa, Artificial Sequence
  Cyclic GFR-binding peptide
EPLTILYYVGRKPKVEQLSNDAANNVV

SEQ ID NO: 123864 - protein, 27 aa, Artificial Sequence
  Cyclic GFR-binding peptide
EPLPIVYYVGRTPKVEQLSNDAANNVV

SEQ ID NO: 123865 - protein, 27 aa, Artificial Sequence
  Cyclic GFR-binding peptide
NAISMLYFDEYDKVVLKKYRDAANNVV

SEQ ID NO: 123866 - protein, 27 aa, Artificial Sequence
  Cyclic GFR-binding peptide
SPISVLFIDDSSNVIYKQYEDAANNVV

SEQ ID NO: 123867 - protein, 27 aa, Artificial Sequence
  Cyclic GFR-binding peptide
SPISILFIVGRTPKVYKQYEDAANNVV

SEQ ID NO: 123868 - protein, 27 aa, Artificial Sequence
  Cyclic GFR-binding peptide
EPLTMLYYDENEKVVEQLSNDAANNVV

SEQ ID NO: 123869 - protein, 27 aa, Artificial Sequence
  Cyclic GFR-binding peptide
NAISILYFVGRTPKVLKKYRDAANNVV

SEQ ID NO: 123870 - protein, 27 aa, Artificial Sequence
  Cyclic GFR-binding peptide
EPLTILYYDSANNVVEQLSNDAANNVV

SEQ ID NO: 123871 - protein, 27 aa, Artificial Sequence
  Cyclic GFR-binding peptide
EPLPIVYYVGRKPKVEQLSNDAANNVV

SEQ ID NO: 123872 - protein, 27 aa, Artificial Sequence
  Cyclic GFR-binding peptide
EPLPIVYYDSANNVVEQLSNDAANNVV

SEQ ID NO: 123873 - protein, 27 aa, Artificial Sequence
  Cyclic GFR-binding peptide
EPLTILYYVGRTPKVEQLSNDAANNVV

SEQ ID NO: 123874 - protein, 27 aa, Artificial Sequence
  Cyclic GFR-binding peptide
SAISILYLVGRTPKVLKNYQDAANNVV

SEQ ID NO: 123875 - protein, 27 aa, Artificial Sequence
  Cyclic GFR-binding peptide
NAISMLYFDENEKVVLKKYRDAANNVV

SEQ ID NO: 123876 - protein, 27 aa, Artificial Sequence
  Cyclic GFR-binding peptide
SPISILFIIGKTPKIYKQYEDAANNVV

SEQ ID NO: 123877 - protein, 27 aa, Artificial Sequence
  Cyclic GFR-binding peptide
SPISILFIDSANNVVYKQYEDAANNVV

SEQ ID NO: 123878 - protein, 27 aa, Artificial Sequence
  Cyclic GFR-binding peptide
NAISILYFVGRKPKVLKKYRDAANNVV

SEQ ID NO: 123879 - protein, 27 aa, Artificial Sequence
  Cyclic GFR-binding peptide
EPLPVVYYDDSSNVIEQLSNDAANNVV

SEQ ID NO: 123880 - protein, 27 aa, Artificial Sequence
  Cyclic GFR-binding peptide
EPLPMVYYDEYDKVVEQLSNDAANNVV

SEQ ID NO: 123881 - protein, 27 aa, Artificial Sequence
  Cyclic GFR-binding peptide
SAISMLYLDENEKVVLKNYQDAANNVV

SEQ ID NO: 123882 - protein, 27 aa, Artificial Sequence
  Cyclic GFR-binding peptide
SPISMLFIDENEKVVYKQYEDAANNVV

SEQ ID NO: 123883 - protein, 27 aa, Artificial Sequence
  Cyclic GFR-binding peptide
SAISILYLVGRKPKVLKNYQDAANNVV

SEQ ID NO: 123884 - protein, 27 aa, Artificial Sequence
  Cyclic GFR-binding peptide
NAISVLYFDDSSNVILKKYRDAANNVV

SEQ ID NO: 123885 - protein, 27 aa, Artificial Sequence
  Cyclic GFR-binding peptide
EPLPMVYYDENEKVVEQLSNDAANNVV

SEQ ID NO: 123886 - protein, 27 aa, Artificial Sequence
  Cyclic GFR-binding peptide
SPISMLFIDEYDKVVYKQYEDAANNVV

SEQ ID NO: 123887 - protein, 27 aa, Artificial Sequence
  Cyclic GFR-binding peptide
SAISILYLDSANNVVLKNYQDAANNVV

SEQ ID NO: 123888 - protein, 27 aa, Artificial Sequence
  Cyclic GFR-binding peptide
SAISILYLIGKTPKILKNYQDAANNVV

SEQ ID NO: 123889 - protein, 27 aa, Artificial Sequence
  Cyclic GFR-binding peptide
EPLTILYYIGKTPKIEQLSNDAANNVV

SEQ ID NO: 123890 - protein, 27 aa, Artificial Sequence
  Cyclic GFR-binding peptide
SPISILFIVGRKPKVYKQYEDAANNVV

SEQ ID NO: 123891 - protein, 27 aa, Artificial Sequence
  Cyclic GFR-binding peptide
SAISMLYLDEYDKVVLKNYQDAANNVV

SEQ ID NO: 123892 - protein, 27 aa, Artificial Sequence
  Cyclic GFR-binding peptide
NAISILYFDSANNVVLKKYRDAANNVV

SEQ ID NO: 123893 - protein, 27 aa, Artificial Sequence
  Cyclic GFR-binding peptide
EPLTVLYYDDSSNVIEQLSNDAANNVV

SEQ ID NO: 123894 - protein, 27 aa, Artificial Sequence
  Cyclic GFR-binding peptide
SAISVLYLDDSSNVILKNYQDAANNVV

SEQ ID NO: 123895 - protein, 29 aa, Artificial Sequence
  Cyclic GFR-binding peptide
DAANNVVVTAKKLKPKKRVYEIKRVQVPR

SEQ ID NO: 123896 - protein, 29 aa, Artificial Sequence
  Cyclic GFR-binding peptide
DAANNVVVQVEKLKPKKRVYEVKAVKVSR

SEQ ID NO: 123897 - protein, 29 aa, Artificial Sequence
  Cyclic GFR-binding peptide
DAANNVVVQVEKFIPKKRVIEVKAVKVSR

SEQ ID NO: 123898 - protein, 29 aa, Artificial Sequence
  Cyclic GFR-binding peptide
DAANNVVVQVEKHQGQHPKIRVKAMKVSR

SEQ ID NO: 123899 - protein, 29 aa, Artificial Sequence
  Cyclic GFR-binding peptide
DAANNVVVTAKKHQGQHPKIRIKRMQVPR

SEQ ID NO: 123900 - protein, 29 aa, Artificial Sequence
  Cyclic GFR-binding peptide
DAANNVVSMEGLLKPKKRVYEMIQVTINS

SEQ ID NO: 123901 - protein, 29 aa, Artificial Sequence
  Cyclic GFR-binding peptide
DAANNVVSMEGIFIPKKRVIEMIQVTINS

SEQ ID NO: 123902 - protein, 29 aa, Artificial Sequence
  Cyclic GFR-binding peptide
DAANNVVSMEGLHQGQHPKIRMIQMTINS

SEQ ID NO: 123903 - protein, 29 aa, Artificial Sequence
  Cyclic GFR-binding peptide
DAANNVVSMEGILKPKKRVYEMIQVTINS

SEQ ID NO: 123904 - protein, 29 aa, Artificial Sequence
  Cyclic GFR-binding peptide
DAANNVVSMEGLFIPKKRVIEMIQVTINS

SEQ ID NO: 123905 - protein, 29 aa, Artificial Sequence
  Cyclic GFR-binding peptide
DAANNVVVTAKKFIPKKRVIEIKRVQVPR

SEQ ID NO: 123906 - protein, 29 aa, Artificial Sequence
  Cyclic GFR-binding peptide
DAANNVVSMEGIHQGQHPKIRMIQMTINS

SEQ ID NO: 123907 - protein, 29 aa, Artificial Sequence
  Cyclic GFR-binding peptide
RPVQVRKIEYVRKKPKLKKATVDAANNVV

SEQ ID NO: 123908 - protein, 29 aa, Artificial Sequence
  Cyclic GFR-binding peptide
RSVKVAKVEYVRKKPKLKEVQVDAANNVV

SEQ ID NO: 123909 - protein, 29 aa, Artificial Sequence
  Cyclic GFR-binding peptide
RSVKVAKVEIVRKKPIFKEVQVDAANNVV

SEQ ID NO: 123910 - protein, 29 aa, Artificial Sequence
  Cyclic GFR-binding peptide
RSVKMAKVRIKPHQGQHKEVQVDAANNVV

SEQ ID NO: 123911 - protein, 29 aa, Artificial Sequence
  Cyclic GFR-binding peptide
RPVQMRKIRIKPHQGQHKKATVDAANNVV

SEQ ID NO: 123912 - protein, 29 aa, Artificial Sequence
  Cyclic GFR-binding peptide
SNITVQIMEYVRKKPKLLGEMSDAANNVV

SEQ ID NO: 123913 - protein, 29 aa, Artificial Sequence
  Cyclic GFR-binding peptide
SNITVQIMEIVRKKPIFIGEMSDAANNVV

SEQ ID NO: 123914 - protein, 29 aa, Artificial Sequence
  Cyclic GFR-binding peptide
SNITMQIMRIKPHQGQHLGEMSDAANNVV

SEQ ID NO: 123915 - protein, 29 aa, Artificial Sequence
  Cyclic GFR-binding peptide
SNITVQIMEYVRKKPKLIGEMSDAANNVV

SEQ ID NO: 123916 - protein, 29 aa, Artificial Sequence
  Cyclic GFR-binding peptide
SNITVQIMEIVRKKPIFLGEMSDAANNVV

SEQ ID NO: 123917 - protein, 29 aa, Artificial Sequence
  Cyclic GFR-binding peptide
RPVQVRKIEIVRKKPIFKKATVDAANNVV

SEQ ID NO: 123918 - protein, 29 aa, Artificial Sequence
  Cyclic GFR-binding peptide
SNITMQIMRIKPHQGQHIGEMSDAANNVV

SEQ ID NO: 123919 - protein, 29 aa, Artificial Sequence
  Cyclic GFR-binding peptide
DAANNVVVTAKKLKPKKRVYEIKRVQVPR

SEQ ID NO: 123920 - protein, 29 aa, Artificial Sequence
  Cyclic GFR-binding peptide
DAANNVVVQVEKLKPKKRVYEVKAVKVSR

SEQ ID NO: 123921 - protein, 29 aa, Artificial Sequence
  Cyclic GFR-binding peptide
DAANNVVVQVEKFIPKKRVIEVKAVKVSR

SEQ ID NO: 123922 - protein, 29 aa, Artificial Sequence
  Cyclic GFR-binding peptide
DAANNVVVQVEKHQGQHPKIRVKAMKVSR

SEQ ID NO: 123923 - protein, 29 aa, Artificial Sequence
  Cyclic GFR-binding peptide
DAANNVVVTAKKHQGQHPKIRIKRMQVPR

SEQ ID NO: 123924 - protein, 29 aa, Artificial Sequence
  Cyclic GFR-binding peptide
DAANNVVSMEGLLKPKKRVYEMIQVTINS

SEQ ID NO: 123925 - protein, 29 aa, Artificial Sequence
  Cyclic GFR-binding peptide
DAANNVVSMEGIFIPKKRVIEMIQVTINS

SEQ ID NO: 123926 - protein, 29 aa, Artificial Sequence
  Cyclic GFR-binding peptide
DAANNVVSMEGLHQGQHPKIRMIQMTINS

SEQ ID NO: 123927 - protein, 29 aa, Artificial Sequence
  Cyclic GFR-binding peptide
DAANNVVSMEGILKPKKRVYEMIQVTINS

SEQ ID NO: 123928 - protein, 29 aa, Artificial Sequence
  Cyclic GFR-binding peptide
DAANNVVSMEGLFIPKKRVIEMIQVTINS

SEQ ID NO: 123929 - protein, 29 aa, Artificial Sequence
  Cyclic GFR-binding peptide
DAANNVVVTAKKFIPKKRVIEIKRVQVPR

SEQ ID NO: 123930 - protein, 29 aa, Artificial Sequence
  Cyclic GFR-binding peptide
DAANNVVSMEGIHQGQHPKIRMIQMTINS

SEQ ID NO: 123931 - protein, 29 aa, Artificial Sequence
  Cyclic GFR-binding peptide
RPVQVRKIEYVRKKPKLKKATVDAANNVV

SEQ ID NO: 123932 - protein, 29 aa, Artificial Sequence
  Cyclic GFR-binding peptide
RSVKVAKVEYVRKKPKLKEVQVDAANNVV

SEQ ID NO: 123933 - protein, 29 aa, Artificial Sequence
  Cyclic GFR-binding peptide
RSVKVAKVEIVRKKPIFKEVQVDAANNVV

SEQ ID NO: 123934 - protein, 29 aa, Artificial Sequence
  Cyclic GFR-binding peptide
RSVKMAKVRIKPHQGQHKEVQVDAANNVV

SEQ ID NO: 123935 - protein, 29 aa, Artificial Sequence
  Cyclic GFR-binding peptide
RPVQMRKIRIKPHQGQHKKATVDAANNVV

SEQ ID NO: 123936 - protein, 29 aa, Artificial Sequence
  Cyclic GFR-binding peptide
SNITVQIMEYVRKKPKLLGEMSDAANNVV

SEQ ID NO: 123937 - protein, 29 aa, Artificial Sequence
  Cyclic GFR-binding peptide
SNITVQIMEIVRKKPIFIGEMSDAANNVV

SEQ ID NO: 123938 - protein, 29 aa, Artificial Sequence
  Cyclic GFR-binding peptide
SNITMQIMRIKPHQGQHLGEMSDAANNVV

SEQ ID NO: 123939 - protein, 29 aa, Artificial Sequence
  Cyclic GFR-binding peptide
SNITVQIMEYVRKKPKLIGEMSDAANNVV

SEQ ID NO: 123940 - protein, 29 aa, Artificial Sequence
  Cyclic GFR-binding peptide
SNITVQIMEIVRKKPIFLGEMSDAANNVV

SEQ ID NO: 123941 - protein, 29 aa, Artificial Sequence
  Cyclic GFR-binding peptide
RPVQVRKIEIVRKKPIFKKATVDAANNVV

SEQ ID NO: 123942 - protein, 29 aa, Artificial Sequence
  Cyclic GFR-binding peptide
SNITMQIMRIKPHQGQHIGEMSDAANNVV

SEQ ID NO: 123943 - protein, 27 aa, Artificial Sequence
  Cyclic GFR-binding peptide
DAANNVVEYQKYVVKENEDIYLMSIPS

SEQ ID NO: 123944 - protein, 27 aa, Artificial Sequence
  Cyclic GFR-binding peptide
DAANNVVRYKKLIKPTKGIFYLISIAN

SEQ ID NO: 123945 - protein, 27 aa, Artificial Sequence
  Cyclic GFR-binding peptide
DAANNVVEYKFKVKPTRGVLYLISIPE

SEQ ID NO: 123946 - protein, 27 aa, Artificial Sequence
  Cyclic GFR-binding peptide
DAANNVVYHYKLVVKDYEDKYLMSIPS

SEQ ID NO: 123947 - protein, 27 aa, Artificial Sequence
  Cyclic GFR-binding peptide
DAANNVVEYKFKTPVGMDDLYLVSIPE

SEQ ID NO: 123948 - protein, 27 aa, Artificial Sequence
  Cyclic GFR-binding peptide
DAANNVVEYQKYVKPKRGVIYLISIPS

SEQ ID NO: 123949 - protein, 27 aa, Artificial Sequence
  Cyclic GFR-binding peptide
DAANNVVRYKKLVVKDYEDFYLMSIAN

SEQ ID NO: 123950 - protein, 27 aa, Artificial Sequence
  Cyclic GFR-binding peptide
DAANNVVEYQKYVVKDYEDIYLMSIPS

SEQ ID NO: 123951 - protein, 27 aa, Artificial Sequence
  Cyclic GFR-binding peptide
DAANNVVRYKKLVKPTRGVFYLISIAN

SEQ ID NO: 123952 - protein, 27 aa, Artificial Sequence
  Cyclic GFR-binding peptide
DAANNVVYHYKLIKPTKGIKYLISIPS

SEQ ID NO: 123953 - protein, 27 aa, Artificial Sequence
  Cyclic GFR-binding peptide
DAANNVVYHYKLVVKENEDKYLMSIPS

SEQ ID NO: 123954 - protein, 27 aa, Artificial Sequence
  Cyclic GFR-binding peptide
DAANNVVYHYKLVKPKRGVKYLISIPS

SEQ ID NO: 123955 - protein, 27 aa, Artificial Sequence
  Cyclic GFR-binding peptide
DAANNVVEYKFKIKPTKGILYLISIPE

SEQ ID NO: 123956 - protein, 27 aa, Artificial Sequence
  Cyclic GFR-binding peptide
DAANNVVEYQKYIKPTKGIIYLISIPS

SEQ ID NO: 123957 - protein, 27 aa, Artificial Sequence
  Cyclic GFR-binding peptide
DAANNVVRYKKLVVKENEDFYLMSIAN

SEQ ID NO: 123958 - protein, 27 aa, Artificial Sequence
  Cyclic GFR-binding peptide
DAANNVVRYKKLVVNNAADFYLISIAN

SEQ ID NO: 123959 - protein, 27 aa, Artificial Sequence
  Cyclic GFR-binding peptide
DAANNVVYHYKLYTVVGKDKYLISIPS

SEQ ID NO: 123960 - protein, 27 aa, Artificial Sequence
  Cyclic GFR-binding peptide
DAANNVVRYKKLTPVGMDDFYLVSIAN

SEQ ID NO: 123961 - protein, 27 aa, Artificial Sequence
  Cyclic GFR-binding peptide
DAANNVVRYKKLVKPKRGVFYLISIAN

SEQ ID NO: 123962 - protein, 27 aa, Artificial Sequence
  Cyclic GFR-binding peptide
DAANNVVYHYKLVVNNAADKYLISIPS

SEQ ID NO: 123963 - protein, 27 aa, Artificial Sequence
  Cyclic GFR-binding peptide
DAANNVVYHYKLIVNSSDDKYLVSIPS

SEQ ID NO: 123964 - protein, 27 aa, Artificial Sequence
  Cyclic GFR-binding peptide
DAANNVVRYKKLIVNNSSDFYLVSIAN

SEQ ID NO: 123965 - protein, 27 aa, Artificial Sequence
  Cyclic GFR-binding peptide
DAANNVVRYKKLYTVVGKDFYLISIAN

SEQ ID NO: 123966 - protein, 27 aa, Artificial Sequence
  Cyclic GFR-binding peptide
DAANNVVEYQKYVVNNAADIYLISIPS

SEQ ID NO: 123967 - protein, 27 aa, Artificial Sequence
  Cyclic GFR-binding peptide
DAANNVVRYKKLIVNSSDDFYLVSIAN

SEQ ID NO: 123968 - protein, 27 aa, Artificial Sequence
  Cyclic GFR-binding peptide
DAANNVVEYKFKIVNNSSDLYLVSIPE

SEQ ID NO: 123969 - protein, 27 aa, Artificial Sequence
  Cyclic GFR-binding peptide
DAANNVVEYQKYVKPTRGVIYLISIPS

SEQ ID NO: 123970 - protein, 27 aa, Artificial Sequence
  Cyclic GFR-binding peptide
DAANNVVEYQKYIVNSSDDIYLVSIPS

SEQ ID NO: 123971 - protein, 27 aa, Artificial Sequence
  Cyclic GFR-binding peptide
DAANNVVYHYKLTPVGMDDKYLVSIPS

SEQ ID NO: 123972 - protein, 27 aa, Artificial Sequence
  Cyclic GFR-binding peptide
DAANNVVYHYKLIVNNSSDKYLVSIPS

SEQ ID NO: 123973 - protein, 27 aa, Artificial Sequence
  Cyclic GFR-binding peptide
DAANNVVEYKFKIVNSSDDLYLVSIPE

SEQ ID NO: 123974 - protein, 27 aa, Artificial Sequence
  Cyclic GFR-binding peptide
DAANNVVYHYKLVKPTRGVKYLISIPS

SEQ ID NO: 123975 - protein, 27 aa, Artificial Sequence
  Cyclic GFR-binding peptide
DAANNVVEYKFKVKPKRGVLYLISIPE

SEQ ID NO: 123976 - protein, 27 aa, Artificial Sequence
  Cyclic GFR-binding peptide
DAANNVVEYQKYYTVVGKDIYLISIPS

SEQ ID NO: 123977 - protein, 27 aa, Artificial Sequence
  Cyclic GFR-binding peptide
DAANNVVEYKFKVVKENEDLYLMSIPE

SEQ ID NO: 123978 - protein, 27 aa, Artificial Sequence
  Cyclic GFR-binding peptide
DAANNVVEYQKYTPVGMDDIYLVSIPS

SEQ ID NO: 123979 - protein, 27 aa, Artificial Sequence
  Cyclic GFR-binding peptide
DAANNVVEYQKYIVNNSSDIYLVSIPS

SEQ ID NO: 123980 - protein, 27 aa, Artificial Sequence
  Cyclic GFR-binding peptide
DAANNVVEYKFKVVKDYEDLYLMSIPE

SEQ ID NO: 123981 - protein, 27 aa, Artificial Sequence
  Cyclic GFR-binding peptide
DAANNVVEYKFKYTVVGKDLYLISIPE

SEQ ID NO: 123982 - protein, 27 aa, Artificial Sequence
  Cyclic GFR-binding peptide
DAANNVVEYKFKVVNNAADLYLISIPE

SEQ ID NO: 123983 - protein, 27 aa, Artificial Sequence
  Cyclic GFR-binding peptide
SPISMLYIDENEKVVYKQYEDAANNVV

SEQ ID NO: 123984 - protein, 27 aa, Artificial Sequence
  Cyclic GFR-binding peptide
NAISILYFIGKTPKILKKYRDAANNVV

SEQ ID NO: 123985 - protein, 27 aa, Artificial Sequence
  Cyclic GFR-binding peptide
EPISILYLVGRTPKVKFKYEDAANNVV

SEQ ID NO: 123986 - protein, 27 aa, Artificial Sequence
  Cyclic GFR-binding peptide
SPISMLYKDEYDKVVLKYHYDAANNVV

SEQ ID NO: 123987 - protein, 27 aa, Artificial Sequence
  Cyclic GFR-binding peptide
EPISVLYLDDMGVPTKFKYEDAANNVV

SEQ ID NO: 123988 - protein, 27 aa, Artificial Sequence
  Cyclic GFR-binding peptide
SPISILYIVGRKPKVYKQYEDAANNVV

SEQ ID NO: 123989 - protein, 27 aa, Artificial Sequence
  Cyclic GFR-binding peptide
NAISMLYFDEYDKVVLKKYRDAANNVV

SEQ ID NO: 123990 - protein, 27 aa, Artificial Sequence
  Cyclic GFR-binding peptide
SPISMLYIDEYDKVVYKQYEDAANNVV

SEQ ID NO: 123991 - protein, 27 aa, Artificial Sequence
  Cyclic GFR-binding peptide
NAISILYFVGRTPKVLKKYRDAANNVV

SEQ ID NO: 123992 - protein, 27 aa, Artificial Sequence
  Cyclic GFR-binding peptide
SPISILYKIGKTPKILKYHYDAANNVV

SEQ ID NO: 123993 - protein, 27 aa, Artificial Sequence
  Cyclic GFR-binding peptide
SPISMLYKDENEKVVLKYHYDAANNVV

SEQ ID NO: 123994 - protein, 27 aa, Artificial Sequence
  Cyclic GFR-binding peptide
SPISILYKVGRKPKVLKYHYDAANNVV

SEQ ID NO: 123995 - protein, 27 aa, Artificial Sequence
  Cyclic GFR-binding peptide
EPISILYLIGKTPKIKFKYEDAANNVV

SEQ ID NO: 123996 - protein, 27 aa, Artificial Sequence
  Cyclic GFR-binding peptide
SPISILYIIGKTPKIYKQYEDAANNVV

SEQ ID NO: 123997 - protein, 27 aa, Artificial Sequence
  Cyclic GFR-binding peptide
NAISMLYFDENEKVVLKKYRDAANNVV

SEQ ID NO: 123998 - protein, 27 aa, Artificial Sequence
  Cyclic GFR-binding peptide
NAISILYFDAANNVVLKKYRDAANNVV

SEQ ID NO: 123999 - protein, 27 aa, Artificial Sequence
  Cyclic GFR-binding peptide
SPISILYKDKGVVTYLKYHYDAANNVV

SEQ ID NO: 124000 - protein, 27 aa, Artificial Sequence
  Cyclic GFR-binding peptide
NAISVLYFDDMGVPTLKKYRDAANNVV

SEQ ID NO: 124001 - protein, 27 aa, Artificial Sequence
  Cyclic GFR-binding peptide
NAISILYFVGRKPKVLKKYRDAANNVV

SEQ ID NO: 124002 - protein, 27 aa, Artificial Sequence
  Cyclic GFR-binding peptide
SPISILYKDAANNVVLKYHYDAANNVV

SEQ ID NO: 124003 - protein, 27 aa, Artificial Sequence
  Cyclic GFR-binding peptide
SPISVLYKDDSSNVILKYHYDAANNVV

SEQ ID NO: 124004 - protein, 27 aa, Artificial Sequence
  Cyclic GFR-binding peptide
NAISVLYFDSSNNVILKKYRDAANNVV

SEQ ID NO: 124005 - protein, 27 aa, Artificial Sequence
  Cyclic GFR-binding peptide
NAISILYFDKGVVTYLKKYRDAANNVV

SEQ ID NO: 124006 - protein, 27 aa, Artificial Sequence
  Cyclic GFR-binding peptide
SPISILYIDAANNVVYKQYEDAANNVV

SEQ ID NO: 124007 - protein, 27 aa, Artificial Sequence
  Cyclic GFR-binding peptide
NAISVLYFDDSSNVILKKYRDAANNVV

SEQ ID NO: 124008 - protein, 27 aa, Artificial Sequence
  Cyclic GFR-binding peptide
EPISVLYLDSSNNVIKFKYEDAANNVV

SEQ ID NO: 124009 - protein, 27 aa, Artificial Sequence
  Cyclic GFR-binding peptide
SPISILYIVGRTPKVYKQYEDAANNVV

SEQ ID NO: 124010 - protein, 27 aa, Artificial Sequence
  Cyclic GFR-binding peptide
SPISVLYIDDSSNVIYKQYEDAANNVV

SEQ ID NO: 124011 - protein, 27 aa, Artificial Sequence
  Cyclic GFR-binding peptide
SPISVLYKDDMGVPTLKYHYDAANNVV

SEQ ID NO: 124012 - protein, 27 aa, Artificial Sequence
  Cyclic GFR-binding peptide
SPISVLYKDSSNNVILKYHYDAANNVV

SEQ ID NO: 124013 - protein, 27 aa, Artificial Sequence
  Cyclic GFR-binding peptide
EPISVLYLDDSSNVIKFKYEDAANNVV

SEQ ID NO: 124014 - protein, 27 aa, Artificial Sequence
  Cyclic GFR-binding peptide
SPISILYKVGRTPKVLKYHYDAANNVV

SEQ ID NO: 124015 - protein, 27 aa, Artificial Sequence
  Cyclic GFR-binding peptide
EPISILYLVGRKPKVKFKYEDAANNVV

SEQ ID NO: 124016 - protein, 27 aa, Artificial Sequence
  Cyclic GFR-binding peptide
SPISILYIDKGVVTYYKQYEDAANNVV

SEQ ID NO: 124017 - protein, 27 aa, Artificial Sequence
  Cyclic GFR-binding peptide
EPISMLYLDENEKVVKFKYEDAANNVV

SEQ ID NO: 124018 - protein, 27 aa, Artificial Sequence
  Cyclic GFR-binding peptide
SPISVLYIDDMGVPTYKQYEDAANNVV

SEQ ID NO: 124019 - protein, 27 aa, Artificial Sequence
  Cyclic GFR-binding peptide
SPISVLYIDSSNNVIYKQYEDAANNVV

SEQ ID NO: 124020 - protein, 27 aa, Artificial Sequence
  Cyclic GFR-binding peptide
EPISMLYLDEYDKVVKFKYEDAANNVV

SEQ ID NO: 124021 - protein, 27 aa, Artificial Sequence
  Cyclic GFR-binding peptide
EPISILYLDKGVVTYKFKYEDAANNVV

SEQ ID NO: 124022 - protein, 27 aa, Artificial Sequence
  Cyclic GFR-binding peptide
EPISILYLDAANNVVKFKYEDAANNVV

SEQ ID NO: 124023 - protein, 27 aa, Artificial Sequence
  Cyclic GFR-binding peptide
DAANNVVPIKGYIIQQKDNFYLMNIPS

SEQ ID NO: 124024 - protein, 27 aa, Artificial Sequence
  Cyclic GFR-binding peptide
DAANNVVPIKGYVVKDYEDFYLMNIPS

SEQ ID NO: 124025 - protein, 27 aa, Artificial Sequence
  Cyclic GFR-binding peptide
DAANNVVPIKGYIVNSSDDFYLVNIPS

SEQ ID NO: 124026 - protein, 27 aa, Artificial Sequence
  Cyclic GFR-binding peptide
DAANNVVPIKGYLLVRGNDFYLMNIPS

SEQ ID NO: 124027 - protein, 27 aa, Artificial Sequence
  Cyclic GFR-binding peptide
DAANNVVPIKGYVVNNAADFYLINIPS

SEQ ID NO: 124028 - protein, 27 aa, Artificial Sequence
  Cyclic GFR-binding peptide
DAANNVVPIKGYVVKENEDFYLMNIPS

SEQ ID NO: 124029 - protein, 27 aa, Artificial Sequence
  Cyclic GFR-binding peptide
DAANNVVPIKGYVVNNASDFYLINIPS

SEQ ID NO: 124030 - protein, 27 aa, Artificial Sequence
  Cyclic GFR-binding peptide
DAANNVVPIKGYYTVVGKDFYLINIPS

SEQ ID NO: 124031 - protein, 27 aa, Artificial Sequence
  Cyclic GFR-binding peptide
DAANNVVPIKGYTPVGMDDFYLVNIPS

SEQ ID NO: 124032 - protein, 27 aa, Artificial Sequence
  Cyclic GFR-binding peptide
DAANNVVPIKGYIVNNSSDFYLVNIPS

SEQ ID NO: 124033 - protein, 27 aa, Artificial Sequence
  Cyclic GFR-binding peptide
SPINMLYFNDKQQIIYGKIPDAANNVV

SEQ ID NO: 124034 - protein, 27 aa, Artificial Sequence
  Cyclic GFR-binding peptide
SPINMLYFDEYDKVVYGKIPDAANNVV

SEQ ID NO: 124035 - protein, 27 aa, Artificial Sequence
  Cyclic GFR-binding peptide
SPINVLYFDDSSNVIYGKIPDAANNVV

SEQ ID NO: 124036 - protein, 27 aa, Artificial Sequence
  Cyclic GFR-binding peptide
SPINMLYFDNGRVLLYGKIPDAANNVV

SEQ ID NO: 124037 - protein, 27 aa, Artificial Sequence
  Cyclic GFR-binding peptide
SPINILYFDAANNVVYGKIPDAANNVV

SEQ ID NO: 124038 - protein, 27 aa, Artificial Sequence
  Cyclic GFR-binding peptide
SPINMLYFDENEKVVYGKIPDAANNVV

SEQ ID NO: 124039 - protein, 27 aa, Artificial Sequence
  Cyclic GFR-binding peptide
SPINILYFDSANNVVYGKIPDAANNVV

SEQ ID NO: 124040 - protein, 27 aa, Artificial Sequence
  Cyclic GFR-binding peptide
SPINILYFDKGVVTYYGKIPDAANNVV

SEQ ID NO: 124041 - protein, 27 aa, Artificial Sequence
  Cyclic GFR-binding peptide
SPINVLYFDDMGVPTYGKIPDAANNVV

SEQ ID NO: 124042 - protein, 27 aa, Artificial Sequence
  Cyclic GFR-binding peptide
SPINVLYFDSSNNVIYGKIPDAANNVV

SEQ ID NO: 124043 - protein, 27 aa, Artificial Sequence
  Cyclic GFR-binding peptide
DAANNVVPIKGYIIQQKDNFYLMNIPS

SEQ ID NO: 124044 - protein, 27 aa, Artificial Sequence
  Cyclic GFR-binding peptide
DAANNVVPIKGYVVKDYEDFYLMNIPS

SEQ ID NO: 124045 - protein, 27 aa, Artificial Sequence
  Cyclic GFR-binding peptide
DAANNVVPIKGYIVNSSDDFYLVNIPS

SEQ ID NO: 124046 - protein, 27 aa, Artificial Sequence
  Cyclic GFR-binding peptide
DAANNVVPIKGYLLVRGNDFYLMNIPS

SEQ ID NO: 124047 - protein, 27 aa, Artificial Sequence
  Cyclic GFR-binding peptide
DAANNVVPIKGYVVNNAADFYLINIPS

SEQ ID NO: 124048 - protein, 27 aa, Artificial Sequence
  Cyclic GFR-binding peptide
DAANNVVPIKGYVVKENEDFYLMNIPS

SEQ ID NO: 124049 - protein, 27 aa, Artificial Sequence
  Cyclic GFR-binding peptide
DAANNVVPIKGYVVNNASDFYLINIPS

SEQ ID NO: 124050 - protein, 27 aa, Artificial Sequence
  Cyclic GFR-binding peptide
DAANNVVPIKGYYTVVGKDFYLINIPS

SEQ ID NO: 124051 - protein, 27 aa, Artificial Sequence
  Cyclic GFR-binding peptide
DAANNVVPIKGYTPVGMDDFYLVNIPS

SEQ ID NO: 124052 - protein, 27 aa, Artificial Sequence
  Cyclic GFR-binding peptide
DAANNVVPIKGYIVNNSSDFYLVNIPS

SEQ ID NO: 124053 - protein, 27 aa, Artificial Sequence
  Cyclic GFR-binding peptide
SPINMLYFNDKQQIIYGKIPDAANNVV

SEQ ID NO: 124054 - protein, 27 aa, Artificial Sequence
  Cyclic GFR-binding peptide
SPINMLYFDEYDKVVYGKIPDAANNVV

SEQ ID NO: 124055 - protein, 27 aa, Artificial Sequence
  Cyclic GFR-binding peptide
SPINVLYFDDSSNVIYGKIPDAANNVV

SEQ ID NO: 124056 - protein, 27 aa, Artificial Sequence
  Cyclic GFR-binding peptide
SPINMLYFDNGRVLLYGKIPDAANNVV

SEQ ID NO: 124057 - protein, 27 aa, Artificial Sequence
  Cyclic GFR-binding peptide
SPINILYFDAANNVVYGKIPDAANNVV

SEQ ID NO: 124058 - protein, 27 aa, Artificial Sequence
  Cyclic GFR-binding peptide
SPINMLYFDENEKVVYGKIPDAANNVV

SEQ ID NO: 124059 - protein, 27 aa, Artificial Sequence
  Cyclic GFR-binding peptide
SPINILYFDSANNVVYGKIPDAANNVV

SEQ ID NO: 124060 - protein, 27 aa, Artificial Sequence
  Cyclic GFR-binding peptide
SPINILYFDKGVVTYYGKIPDAANNVV

SEQ ID NO: 124061 - protein, 27 aa, Artificial Sequence
  Cyclic GFR-binding peptide
SPINVLYFDDMGVPTYGKIPDAANNVV

SEQ ID NO: 124062 - protein, 27 aa, Artificial Sequence
  Cyclic GFR-binding peptide
SPINVLYFDSSNNVIYGKIPDAANNVV

SEQ ID NO: 124063 - protein, 27 aa, Artificial Sequence
  Cyclic GFR-binding peptide
DAANNVVRYKKLIKPTKGIFYLISIAN

SEQ ID NO: 124064 - protein, 27 aa, Artificial Sequence
  Cyclic GFR-binding peptide
DAANNVVRYKKLVVKDYEDFYLMSIAN

SEQ ID NO: 124065 - protein, 27 aa, Artificial Sequence
  Cyclic GFR-binding peptide
DAANNVVRYKKLVKPTRGVFYLISIAN

SEQ ID NO: 124066 - protein, 27 aa, Artificial Sequence
  Cyclic GFR-binding peptide
DAANNVVRYKKLVVKENEDFYLMSIAN

SEQ ID NO: 124067 - protein, 27 aa, Artificial Sequence
  Cyclic GFR-binding peptide
DAANNVVRYKKLVKPKRGVFYLISIAN

SEQ ID NO: 124068 - protein, 27 aa, Artificial Sequence
  Cyclic GFR-binding peptide
DAANNVVRYKKLIVNSSDDFYLVSIAN

SEQ ID NO: 124069 - protein, 27 aa, Artificial Sequence
  Cyclic GFR-binding peptide
DAANNVVRYKKLVVNNASDFYLISIAN

SEQ ID NO: 124070 - protein, 27 aa, Artificial Sequence
  Cyclic GFR-binding peptide
NAISILYFIGKTPKILKKYRDAANNVV

SEQ ID NO: 124071 - protein, 27 aa, Artificial Sequence
  Cyclic GFR-binding peptide
NAISMLYFDEYDKVVLKKYRDAANNVV

SEQ ID NO: 124072 - protein, 27 aa, Artificial Sequence
  Cyclic GFR-binding peptide
NAISILYFVGRTPKVLKKYRDAANNVV

SEQ ID NO: 124073 - protein, 27 aa, Artificial Sequence
  Cyclic GFR-binding peptide
NAISMLYFDENEKVVLKKYRDAANNVV

SEQ ID NO: 124074 - protein, 27 aa, Artificial Sequence
  Cyclic GFR-binding peptide
NAISILYFVGRKPKVLKKYRDAANNVV

SEQ ID NO: 124075 - protein, 27 aa, Artificial Sequence
  Cyclic GFR-binding peptide
NAISVLYFDDSSNVILKKYRDAANNVV

SEQ ID NO: 124076 - protein, 27 aa, Artificial Sequence
  Cyclic GFR-binding peptide
NAISILYFDSANNVVLKKYRDAANNVV

SEQ ID NO: 124077 - protein, 27 aa, Artificial Sequence
  Cyclic GFR-binding peptide
DAANNVVEYQKYVVKENEDIYLMSIPS

SEQ ID NO: 124078 - protein, 27 aa, Artificial Sequence
  Cyclic GFR-binding peptide
DAANNVVNSLQEVVKDYEDYYLMTLPE

SEQ ID NO: 124079 - protein, 27 aa, Artificial Sequence
  Cyclic GFR-binding peptide
DAANNVVEYQKYVVKENEDIFLMSIPS

SEQ ID NO: 124080 - protein, 27 aa, Artificial Sequence
  Cyclic GFR-binding peptide
DAANNVVNSLQEIKPTKGIYYVIPLPE

SEQ ID NO: 124081 - protein, 27 aa, Artificial Sequence
  Cyclic GFR-binding peptide
DAANNVVNSLQEVKPKRGVYYLITLPE

SEQ ID NO: 124082 - protein, 27 aa, Artificial Sequence
  Cyclic GFR-binding peptide
DAANNVVEYQKYVVNNAADIYLISIPS

SEQ ID NO: 124083 - protein, 27 aa, Artificial Sequence
  Cyclic GFR-binding peptide
DAANNVVNSLQEVKPTRGVYYVIPLPE

SEQ ID NO: 124084 - protein, 27 aa, Artificial Sequence
  Cyclic GFR-binding peptide
DAANNVVEYQKYIVNSSDDIFLVSIPS

SEQ ID NO: 124085 - protein, 27 aa, Artificial Sequence
  Cyclic GFR-binding peptide
DAANNVVEYQKYVKPTRGVIFLISIPS

SEQ ID NO: 124086 - protein, 27 aa, Artificial Sequence
  Cyclic GFR-binding peptide
DAANNVVEYQKYVVKDYEDIYLMSIPS

SEQ ID NO: 124087 - protein, 27 aa, Artificial Sequence
  Cyclic GFR-binding peptide
DAANNVVNSLQEVVKENEDYYLMTLPE

SEQ ID NO: 124088 - protein, 27 aa, Artificial Sequence
  Cyclic GFR-binding peptide
DAANNVVNSLQEVVNNASDYYLITLPE

SEQ ID NO: 124089 - protein, 27 aa, Artificial Sequence
  Cyclic GFR-binding peptide
DAANNVVNSLQEVKPKRGVYYVIPLPE

SEQ ID NO: 124090 - protein, 27 aa, Artificial Sequence
  Cyclic GFR-binding peptide
DAANNVVEYQKYIVNSSDDIYLVSIPS

SEQ ID NO: 124091 - protein, 27 aa, Artificial Sequence
  Cyclic GFR-binding peptide
DAANNVVNSLQEVVKENEDYYVMPLPE

SEQ ID NO: 124092 - protein, 27 aa, Artificial Sequence
  Cyclic GFR-binding peptide
DAANNVVEYQKYVVKDYEDIFLMSIPS

SEQ ID NO: 124093 - protein, 27 aa, Artificial Sequence
  Cyclic GFR-binding peptide
DAANNVVNSLQEVVNNASDYYVIPLPE

SEQ ID NO: 124094 - protein, 27 aa, Artificial Sequence
  Cyclic GFR-binding peptide
DAANNVVEYQKYVVNNASDIYLISIPS

SEQ ID NO: 124095 - protein, 27 aa, Artificial Sequence
  Cyclic GFR-binding peptide
DAANNVVNSLQEVKPTRGVYYLITLPE

SEQ ID NO: 124096 - protein, 27 aa, Artificial Sequence
  Cyclic GFR-binding peptide
DAANNVVEYQKYYTVVGKDIYLISIPS

SEQ ID NO: 124097 - protein, 27 aa, Artificial Sequence
  Cyclic GFR-binding peptide
DAANNVVEYQKYIIQQKDNIYLMSIPS

SEQ ID NO: 124098 - protein, 27 aa, Artificial Sequence
  Cyclic GFR-binding peptide
DAANNVVEYQKYTPVGMDDIYLVSIPS

SEQ ID NO: 124099 - protein, 27 aa, Artificial Sequence
  Cyclic GFR-binding peptide
DAANNVVEYQKYIKPTKGIIFLISIPS

SEQ ID NO: 124100 - protein, 27 aa, Artificial Sequence
  Cyclic GFR-binding peptide
DAANNVVEYQKYIVNNSSDIYLVSIPS

SEQ ID NO: 124101 - protein, 27 aa, Artificial Sequence
  Cyclic GFR-binding peptide
DAANNVVNSLQEIKPTKGIYYLITLPE

SEQ ID NO: 124102 - protein, 27 aa, Artificial Sequence
  Cyclic GFR-binding peptide
DAANNVVEYQKYVVNNASDIFLISIPS

SEQ ID NO: 124103 - protein, 27 aa, Artificial Sequence
  Cyclic GFR-binding peptide
DAANNVVEYQKYVKPKRGVIFLISIPS

SEQ ID NO: 124104 - protein, 27 aa, Artificial Sequence
  Cyclic GFR-binding peptide
DAANNVVNSLQEIVNSSDDYYVVPLPE

SEQ ID NO: 124105 - protein, 27 aa, Artificial Sequence
  Cyclic GFR-binding peptide
DAANNVVNSLQEVVKDYEDYYVMPLPE

SEQ ID NO: 124106 - protein, 27 aa, Artificial Sequence
  Cyclic GFR-binding peptide
DAANNVVEYQKYLLVRGNDIYLMSIPS

SEQ ID NO: 124107 - protein, 27 aa, Artificial Sequence
  Cyclic GFR-binding peptide
DAANNVVNSLQEIVNSSDDYYLVTLPE

SEQ ID NO: 124108 - protein, 27 aa, Artificial Sequence
  Cyclic GFR-binding peptide
SPISMLYIDENEKVVYKQYEDAANNVV

SEQ ID NO: 124109 - protein, 27 aa, Artificial Sequence
  Cyclic GFR-binding peptide
EPLTMLYYDEYDKVVEQLSNDAANNVV

SEQ ID NO: 124110 - protein, 27 aa, Artificial Sequence
  Cyclic GFR-binding peptide
SPISMLFIDENEKVVYKQYEDAANNVV

SEQ ID NO: 124111 - protein, 27 aa, Artificial Sequence
  Cyclic GFR-binding peptide
EPLPIVYYIGKTPKIEQLSNDAANNVV

SEQ ID NO: 124112 - protein, 27 aa, Artificial Sequence
  Cyclic GFR-binding peptide
EPLTILYYVGRKPKVEQLSNDAANNVV

SEQ ID NO: 124113 - protein, 27 aa, Artificial Sequence
  Cyclic GFR-binding peptide
SPISILYIDAANNVVYKQYEDAANNVV

SEQ ID NO: 124114 - protein, 27 aa, Artificial Sequence
  Cyclic GFR-binding peptide
EPLPIVYYVGRTPKVEQLSNDAANNVV

SEQ ID NO: 124115 - protein, 27 aa, Artificial Sequence
  Cyclic GFR-binding peptide
SPISVLFIDDSSNVIYKQYEDAANNVV

SEQ ID NO: 124116 - protein, 27 aa, Artificial Sequence
  Cyclic GFR-binding peptide
SPISILFIVGRTPKVYKQYEDAANNVV

SEQ ID NO: 124117 - protein, 27 aa, Artificial Sequence
  Cyclic GFR-binding peptide
SPISMLYIDEYDKVVYKQYEDAANNVV

SEQ ID NO: 124118 - protein, 27 aa, Artificial Sequence
  Cyclic GFR-binding peptide
EPLTMLYYDENEKVVEQLSNDAANNVV

SEQ ID NO: 124119 - protein, 27 aa, Artificial Sequence
  Cyclic GFR-binding peptide
EPLTILYYDSANNVVEQLSNDAANNVV

SEQ ID NO: 124120 - protein, 27 aa, Artificial Sequence
  Cyclic GFR-binding peptide
EPLPIVYYVGRKPKVEQLSNDAANNVV

SEQ ID NO: 124121 - protein, 27 aa, Artificial Sequence
  Cyclic GFR-binding peptide
SPISVLYIDDSSNVIYKQYEDAANNVV

SEQ ID NO: 124122 - protein, 27 aa, Artificial Sequence
  Cyclic GFR-binding peptide
EPLPMVYYDENEKVVEQLSNDAANNVV

SEQ ID NO: 124123 - protein, 27 aa, Artificial Sequence
  Cyclic GFR-binding peptide
SPISMLFIDEYDKVVYKQYEDAANNVV

SEQ ID NO: 124124 - protein, 27 aa, Artificial Sequence
  Cyclic GFR-binding peptide
EPLPIVYYDSANNVVEQLSNDAANNVV

SEQ ID NO: 124125 - protein, 27 aa, Artificial Sequence
  Cyclic GFR-binding peptide
SPISILYIDSANNVVYKQYEDAANNVV

SEQ ID NO: 124126 - protein, 27 aa, Artificial Sequence
  Cyclic GFR-binding peptide
EPLTILYYVGRTPKVEQLSNDAANNVV

SEQ ID NO: 124127 - protein, 27 aa, Artificial Sequence
  Cyclic GFR-binding peptide
SPISILYIDKGVVTYYKQYEDAANNVV

SEQ ID NO: 124128 - protein, 27 aa, Artificial Sequence
  Cyclic GFR-binding peptide
SPISMLYINDKQQIIYKQYEDAANNVV

SEQ ID NO: 124129 - protein, 27 aa, Artificial Sequence
  Cyclic GFR-binding peptide
SPISVLYIDDMGVPTYKQYEDAANNVV

SEQ ID NO: 124130 - protein, 27 aa, Artificial Sequence
  Cyclic GFR-binding peptide
SPISILFIIGKTPKIYKQYEDAANNVV

SEQ ID NO: 124131 - protein, 27 aa, Artificial Sequence
  Cyclic GFR-binding peptide
SPISVLYIDSSNNVIYKQYEDAANNVV

SEQ ID NO: 124132 - protein, 27 aa, Artificial Sequence
  Cyclic GFR-binding peptide
EPLTILYYIGKTPKIEQLSNDAANNVV

SEQ ID NO: 124133 - protein, 27 aa, Artificial Sequence
  Cyclic GFR-binding peptide
SPISILFIDSANNVVYKQYEDAANNVV

SEQ ID NO: 124134 - protein, 27 aa, Artificial Sequence
  Cyclic GFR-binding peptide
SPISILFIVGRKPKVYKQYEDAANNVV

SEQ ID NO: 124135 - protein, 27 aa, Artificial Sequence
  Cyclic GFR-binding peptide
EPLPVVYYDDSSNVIEQLSNDAANNVV

SEQ ID NO: 124136 - protein, 27 aa, Artificial Sequence
  Cyclic GFR-binding peptide
EPLPMVYYDEYDKVVEQLSNDAANNVV

SEQ ID NO: 124137 - protein, 27 aa, Artificial Sequence
  Cyclic GFR-binding peptide
SPISMLYIDNGRVLLYKQYEDAANNVV

SEQ ID NO: 124138 - protein, 27 aa, Artificial Sequence
  Cyclic GFR-binding peptide
EPLTVLYYDDSSNVIEQLSNDAANNVV

SEQ ID NO: 124139 - protein, 27 aa, Artificial Sequence
  Cyclic GFR-binding peptide
DAANNVVPYVKLVVKENEDFFLMSLSS

SEQ ID NO: 124140 - protein, 29 aa, Artificial Sequence
  Cyclic GFR-binding peptide
DAANNVVPYVKLHQGQHPKIRFFLMSLSS

SEQ ID NO: 124141 - protein, 27 aa, Artificial Sequence
  Cyclic GFR-binding peptide
DAANNVVPYVKLVVNKNEDFFLISLSS

SEQ ID NO: 124142 - protein, 27 aa, Artificial Sequence
  Cyclic GFR-binding peptide
DAANNVVPYVKLVKPKRGVLFFISLSS

SEQ ID NO: 124143 - protein, 27 aa, Artificial Sequence
  Cyclic GFR-binding peptide
DAANNVVPYVKLVVNNAADFFLISLSS

SEQ ID NO: 124144 - protein, 27 aa, Artificial Sequence
  Cyclic GFR-binding peptide
DAANNVVPYVKLIVNNSSDFFLVSLSS

SEQ ID NO: 124145 - protein, 27 aa, Artificial Sequence
  Cyclic GFR-binding peptide
DAANNVVPYVKLIIQQKDNFFLMSLSS

SEQ ID NO: 124146 - protein, 27 aa, Artificial Sequence
  Cyclic GFR-binding peptide
DAANNVVPYVKLLLVRGNDFFLMSLSS

SEQ ID NO: 124147 - protein, 27 aa, Artificial Sequence
  Cyclic GFR-binding peptide
DAANNVVPYVKLVKPTRGVLFFISLSS

SEQ ID NO: 124148 - protein, 27 aa, Artificial Sequence
  Cyclic GFR-binding peptide
DAANNVVPYVKLVVNNASDFFLISLSS

SEQ ID NO: 124149 - protein, 27 aa, Artificial Sequence
  Cyclic GFR-binding peptide
DAANNVVPYVKLIKPTKGILFFISLSS

SEQ ID NO: 124150 - protein, 27 aa, Artificial Sequence
  Cyclic GFR-binding peptide
DAANNVVPYVKLTPVGMDDFFLVSLSS

SEQ ID NO: 124151 - protein, 27 aa, Artificial Sequence
  Cyclic GFR-binding peptide
DAANNVVPYVKLYTVVGKDFFLISLSS

SEQ ID NO: 124152 - protein, 27 aa, Artificial Sequence
  Cyclic GFR-binding peptide
DAANNVVPYVKLVVKDYEDFFLMSLSS

SEQ ID NO: 124153 - protein, 27 aa, Artificial Sequence
  Cyclic GFR-binding peptide
DAANNVVPYVKLIVNSSDDFFLVSLSS

SEQ ID NO: 124154 - protein, 29 aa, Artificial Sequence
  Cyclic GFR-binding peptide
DAANNVVPYVKLLKPKKRVYEFFLVSLSS

SEQ ID NO: 124155 - protein, 27 aa, Artificial Sequence
  Cyclic GFR-binding peptide
SSLSMLFFDENEKVVLKVYPDAANNVV

SEQ ID NO: 124156 - protein, 29 aa, Artificial Sequence
  Cyclic GFR-binding peptide
SSLSMLFFRIKPHQGQHLKVYPDAANNVV

SEQ ID NO: 124157 - protein, 27 aa, Artificial Sequence
  Cyclic GFR-binding peptide
SSLSILFFDENKNVVLKVYPDAANNVV

SEQ ID NO: 124158 - protein, 27 aa, Artificial Sequence
  Cyclic GFR-binding peptide
SSLSILFFVGRKPKVLKVYPDAANNVV

SEQ ID NO: 124159 - protein, 27 aa, Artificial Sequence
  Cyclic GFR-binding peptide
SSLSILFFDAANNVVLKVYPDAANNVV

SEQ ID NO: 124160 - protein, 27 aa, Artificial Sequence
  Cyclic GFR-binding peptide
SSLSVLFFDSSNNVILKVYPDAANNVV

SEQ ID NO: 124161 - protein, 27 aa, Artificial Sequence
  Cyclic GFR-binding peptide
SSLSMLFFNDKQQIILKVYPDAANNVV

SEQ ID NO: 124162 - protein, 27 aa, Artificial Sequence
  Cyclic GFR-binding peptide
SSLSMLFFDNGRVLLLKVYPDAANNVV

SEQ ID NO: 124163 - protein, 27 aa, Artificial Sequence
  Cyclic GFR-binding peptide
SSLSILFFVGRTPKVLKVYPDAANNVV

SEQ ID NO: 124164 - protein, 27 aa, Artificial Sequence
  Cyclic GFR-binding peptide
SSLSILFFDSANNVVLKVYPDAANNVV

SEQ ID NO: 124165 - protein, 27 aa, Artificial Sequence
  Cyclic GFR-binding peptide
SSLSILFFIGKTPKILKVYPDAANNVV

SEQ ID NO: 124166 - protein, 27 aa, Artificial Sequence
  Cyclic GFR-binding peptide
SSLSVLFFDDMGVPTLKVYPDAANNVV

SEQ ID NO: 124167 - protein, 27 aa, Artificial Sequence
  Cyclic GFR-binding peptide
SSLSILFFDKGVVTYLKVYPDAANNVV

SEQ ID NO: 124168 - protein, 27 aa, Artificial Sequence
  Cyclic GFR-binding peptide
SSLSMLFFDEYDKVVLKVYPDAANNVV

SEQ ID NO: 124169 - protein, 27 aa, Artificial Sequence
  Cyclic GFR-binding peptide
SSLSVLFFDDSSNVILKVYPDAANNVV

SEQ ID NO: 124170 - protein, 29 aa, Artificial Sequence
  Cyclic GFR-binding peptide
SSLSVLFFEYVRKKPKLLKVYPDAANNVV

SEQ ID NO: 124171 - protein, 27 aa, Artificial Sequence
  Cyclic GFR-binding peptide
DAANNVVNSLQEVVKDYEDYYLMTLPE

SEQ ID NO: 124172 - protein, 27 aa, Artificial Sequence
  Cyclic GFR-binding peptide
DAANNVVNSLQEIKPTKGIYYVIPLPE

SEQ ID NO: 124173 - protein, 27 aa, Artificial Sequence
  Cyclic GFR-binding peptide
DAANNVVSMEGIIVNSSDDMIQVTINS

SEQ ID NO: 124174 - protein, 27 aa, Artificial Sequence
  Cyclic GFR-binding peptide
DAANNVVNSLQEVKPKRGVYYLITLPE

SEQ ID NO: 124175 - protein, 27 aa, Artificial Sequence
  Cyclic GFR-binding peptide
DAANNVVNSLQEVKPTRGVYYVIPLPE

SEQ ID NO: 124176 - protein, 27 aa, Artificial Sequence
  Cyclic GFR-binding peptide
DAANNVVVTAKKVVKENEDIKRMQVPR

SEQ ID NO: 124177 - protein, 27 aa, Artificial Sequence
  Cyclic GFR-binding peptide
DAANNVVNSLQEIVNSSDDYYVVPLPE

SEQ ID NO: 124178 - protein, 29 aa, Artificial Sequence
  Cyclic GFR-binding peptide
DAANNVVSMEGIHQGQHPKIRMIQMTINS

SEQ ID NO: 124179 - protein, 29 aa, Artificial Sequence
  Cyclic GFR-binding peptide
DAANNVVVTAKKLKPKKRVYEIKRVQVPR

SEQ ID NO: 124180 - protein, 27 aa, Artificial Sequence
  Cyclic GFR-binding peptide
DAANNVVSMEGIVVKDYEDMIQMTINS

SEQ ID NO: 124181 - protein, 29 aa, Artificial Sequence
  Cyclic GFR-binding peptide
DAANNVVVQVEKHQGQHPKIRVKAMKVSR

SEQ ID NO: 124182 - protein, 27 aa, Artificial Sequence
  Cyclic GFR-binding peptide
DAANNVVVTAKKIKPTKGIIKRIQVPR

SEQ ID NO: 124183 - protein, 27 aa, Artificial Sequence
  Cyclic GFR-binding peptide
DAANNVVSMEGIVKPTRGVMIQITINS

SEQ ID NO: 124184 - protein, 29 aa, Artificial Sequence
  Cyclic GFR-binding peptide
DAANNVVNSLQEFIPKKRVIEYYVVPLPE

SEQ ID NO: 124185 - protein, 27 aa, Artificial Sequence
  Cyclic GFR-binding peptide
DAANNVVVQVEKVKPKRGVVKAIKVSR

SEQ ID NO: 124186 - protein, 27 aa, Artificial Sequence
  Cyclic GFR-binding peptide
DAANNVVVQVEKVVKENEDVKAMKVSR

SEQ ID NO: 124187 - protein, 27 aa, Artificial Sequence
  Cyclic GFR-binding peptide
DAANNVVNSLQEVVKENEDYYVMPLPE

SEQ ID NO: 124188 - protein, 27 aa, Artificial Sequence
  Cyclic GFR-binding peptide
DAANNVVVTAKKIVNSSDDIKRVQVPR

SEQ ID NO: 124189 - protein, 27 aa, Artificial Sequence
  Cyclic GFR-binding peptide
DAANNVVVQVEKIKPTKGIVKAIKVSR

SEQ ID NO: 124190 - protein, 27 aa, Artificial Sequence
  Cyclic GFR-binding peptide
DAANNVVNSLQEIKPTKGIYYLITLPE

SEQ ID NO: 124191 - protein, 29 aa, Artificial Sequence
  Cyclic GFR-binding peptide
DAANNVVNSLQEFIPKKRVIEYYLVTLPE

SEQ ID NO: 124192 - protein, 27 aa, Artificial Sequence
  Cyclic GFR-binding peptide
DAANNVVVQVEKIVNSSDDVKAVKVSR

SEQ ID NO: 124193 - protein, 27 aa, Artificial Sequence
  Cyclic GFR-binding peptide
DAANNVVNSLQEIVNSSDDYYLVTLPE

SEQ ID NO: 124194 - protein, 29 aa, Artificial Sequence
  Cyclic GFR-binding peptide
DAANNVVVQVEKLKPKKRVYEVKAVKVSR

SEQ ID NO: 124195 - protein, 29 aa, Artificial Sequence
  Cyclic GFR-binding peptide
DAANNVVVQVEKFIPKKRVIEVKAVKVSR

SEQ ID NO: 124196 - protein, 29 aa, Artificial Sequence
  Cyclic GFR-binding peptide
DAANNVVVTAKKHQGQHPKIRIKRMQVPR

SEQ ID NO: 124197 - protein, 27 aa, Artificial Sequence
  Cyclic GFR-binding peptide
DAANNVVNSLQEVVKENEDYYLMTLPE

SEQ ID NO: 124198 - protein, 29 aa, Artificial Sequence
  Cyclic GFR-binding peptide
DAANNVVSMEGIFIPKKRVIEMIQVTINS

SEQ ID NO: 124199 - protein, 27 aa, Artificial Sequence
  Cyclic GFR-binding peptide
DAANNVVNSLQEVKPKRGVYYVIPLPE

SEQ ID NO: 124200 - protein, 27 aa, Artificial Sequence
  Cyclic GFR-binding peptide
DAANNVVVTAKKVKPKRGVIKRIQVPR

SEQ ID NO: 124201 - protein, 27 aa, Artificial Sequence
  Cyclic GFR-binding peptide
DAANNVVNSLQEVKPTRGVYYLITLPE

SEQ ID NO: 124202 - protein, 27 aa, Artificial Sequence
  Cyclic GFR-binding peptide
DAANNVVVQVEKVKPTRGVVKAIKVSR

SEQ ID NO: 124203 - protein, 29 aa, Artificial Sequence
  Cyclic GFR-binding peptide
DAANNVVSMEGILKPKKRVYEMIQVTINS

SEQ ID NO: 124204 - protein, 27 aa, Artificial Sequence
  Cyclic GFR-binding peptide
DAANNVVNSLQEVVKDYEDYYVMPLPE

SEQ ID NO: 124205 - protein, 27 aa, Artificial Sequence
  Cyclic GFR-binding peptide
DAANNVVVTAKKVKPTRGVIKRIQVPR

SEQ ID NO: 124206 - protein, 29 aa, Artificial Sequence
  Cyclic GFR-binding peptide
DAANNVVNSLQELKPKKRVYEYYLVTLPE

SEQ ID NO: 124207 - protein, 27 aa, Artificial Sequence
  Cyclic GFR-binding peptide
DAANNVVSMEGIVKPKRGVMIQITINS

SEQ ID NO: 124208 - protein, 27 aa, Artificial Sequence
  Cyclic GFR-binding peptide
DAANNVVSMEGIVVKENEDMIQMTINS

SEQ ID NO: 124209 - protein, 27 aa, Artificial Sequence
  Cyclic GFR-binding peptide
DAANNVVSMEGIIKPTKGIMIQITINS

SEQ ID NO: 124210 - protein, 29 aa, Artificial Sequence
  Cyclic GFR-binding peptide
DAANNVVNSLQEHQGQHPKIRYYLMTLPE

SEQ ID NO: 124211 - protein, 27 aa, Artificial Sequence
  Cyclic GFR-binding peptide
DAANNVVVTAKKVVKDYEDIKRMQVPR

SEQ ID NO: 124212 - protein, 29 aa, Artificial Sequence
  Cyclic GFR-binding peptide
DAANNVVNSLQEHQGQHPKIRYYVMPLPE

SEQ ID NO: 124213 - protein, 29 aa, Artificial Sequence
  Cyclic GFR-binding peptide
DAANNVVNSLQELKPKKRVYEYYVVPLPE

SEQ ID NO: 124214 - protein, 29 aa, Artificial Sequence
  Cyclic GFR-binding peptide
DAANNVVVTAKKFIPKKRVIEIKRVQVPR

SEQ ID NO: 124215 - protein, 27 aa, Artificial Sequence
  Cyclic GFR-binding peptide
DAANNVVVQVEKVVKDYEDVKAMKVSR

SEQ ID NO: 124216 - protein, 27 aa, Artificial Sequence
  Cyclic GFR-binding peptide
EPLTMLYYDEYDKVVEQLSNDAANNVV

SEQ ID NO: 124217 - protein, 27 aa, Artificial Sequence
  Cyclic GFR-binding peptide
EPLPIVYYIGKTPKIEQLSNDAANNVV

SEQ ID NO: 124218 - protein, 27 aa, Artificial Sequence
  Cyclic GFR-binding peptide
SNITVQIMDDSSNVIIGEMSDAANNVV

SEQ ID NO: 124219 - protein, 27 aa, Artificial Sequence
  Cyclic GFR-binding peptide
EPLTILYYVGRKPKVEQLSNDAANNVV

SEQ ID NO: 124220 - protein, 27 aa, Artificial Sequence
  Cyclic GFR-binding peptide
EPLPIVYYVGRTPKVEQLSNDAANNVV

SEQ ID NO: 124221 - protein, 27 aa, Artificial Sequence
  Cyclic GFR-binding peptide
RPVQMRKIDENEKVVKKATVDAANNVV

SEQ ID NO: 124222 - protein, 27 aa, Artificial Sequence
  Cyclic GFR-binding peptide
EPLPVVYYDDSSNVIEQLSNDAANNVV

SEQ ID NO: 124223 - protein, 29 aa, Artificial Sequence
  Cyclic GFR-binding peptide
SNITMQIMRIKPHQGQHIGEMSDAANNVV

SEQ ID NO: 124224 - protein, 29 aa, Artificial Sequence
  Cyclic GFR-binding peptide
RPVQVRKIEYVRKKPKLKKATVDAANNVV

SEQ ID NO: 124225 - protein, 27 aa, Artificial Sequence
  Cyclic GFR-binding peptide
SNITMQIMDEYDKVVIGEMSDAANNVV

SEQ ID NO: 124226 - protein, 29 aa, Artificial Sequence
  Cyclic GFR-binding peptide
RSVKMAKVRIKPHQGQHKEVQVDAANNVV

SEQ ID NO: 124227 - protein, 27 aa, Artificial Sequence
  Cyclic GFR-binding peptide
RPVQIRKIIGKTPKIKKATVDAANNVV

SEQ ID NO: 124228 - protein, 27 aa, Artificial Sequence
  Cyclic GFR-binding peptide
SNITIQIMVGRTPKVIGEMSDAANNVV

SEQ ID NO: 124229 - protein, 29 aa, Artificial Sequence
  Cyclic GFR-binding peptide
EPLPVVYYEIVRKKPIFEQLSNDAANNVV

SEQ ID NO: 124230 - protein, 27 aa, Artificial Sequence
  Cyclic GFR-binding peptide
RSVKIAKVVGRKPKVKEVQVDAANNVV

SEQ ID NO: 124231 - protein, 27 aa, Artificial Sequence
  Cyclic GFR-binding peptide
RSVKMAKVDENEKVVKEVQVDAANNVV

SEQ ID NO: 124232 - protein, 27 aa, Artificial Sequence
  Cyclic GFR-binding peptide
EPLPMVYYDENEKVVEQLSNDAANNVV

SEQ ID NO: 124233 - protein, 27 aa, Artificial Sequence
  Cyclic GFR-binding peptide
RPVQVRKIDDSSNVIKKATVDAANNVV

SEQ ID NO: 124234 - protein, 27 aa, Artificial Sequence
  Cyclic GFR-binding peptide
RSVKIAKVIGKTPKIKEVQVDAANNVV

SEQ ID NO: 124235 - protein, 27 aa, Artificial Sequence
  Cyclic GFR-binding peptide
EPLTILYYIGKTPKIEQLSNDAANNVV

SEQ ID NO: 124236 - protein, 29 aa, Artificial Sequence
  Cyclic GFR-binding peptide
EPLTVLYYEIVRKKPIFEQLSNDAANNVV

SEQ ID NO: 124237 - protein, 27 aa, Artificial Sequence
  Cyclic GFR-binding peptide
RSVKVAKVDDSSNVIKEVQVDAANNVV

SEQ ID NO: 124238 - protein, 27 aa, Artificial Sequence
  Cyclic GFR-binding peptide
EPLTVLYYDDSSNVIEQLSNDAANNVV

SEQ ID NO: 124239 - protein, 29 aa, Artificial Sequence
  Cyclic GFR-binding peptide
RSVKVAKVEYVRKKPKLKEVQVDAANNVV

SEQ ID NO: 124240 - protein, 29 aa, Artificial Sequence
  Cyclic GFR-binding peptide
RSVKVAKVEIVRKKPIFKEVQVDAANNVV

SEQ ID NO: 124241 - protein, 29 aa, Artificial Sequence
  Cyclic GFR-binding peptide
RPVQMRKIRIKPHQGQHKKATVDAANNVV

SEQ ID NO: 124242 - protein, 27 aa, Artificial Sequence
  Cyclic GFR-binding peptide
EPLTMLYYDENEKVVEQLSNDAANNVV

SEQ ID NO: 124243 - protein, 29 aa, Artificial Sequence
  Cyclic GFR-binding peptide
SNITVQIMEIVRKKPIFIGEMSDAANNVV

SEQ ID NO: 124244 - protein, 27 aa, Artificial Sequence
  Cyclic GFR-binding peptide
EPLPIVYYVGRKPKVEQLSNDAANNVV

SEQ ID NO: 124245 - protein, 27 aa, Artificial Sequence
  Cyclic GFR-binding peptide
RPVQIRKIVGRKPKVKKATVDAANNVV

SEQ ID NO: 124246 - protein, 27 aa, Artificial Sequence
  Cyclic GFR-binding peptide
EPLTILYYVGRTPKVEQLSNDAANNVV

SEQ ID NO: 124247 - protein, 27 aa, Artificial Sequence
  Cyclic GFR-binding peptide
RSVKIAKVVGRTPKVKEVQVDAANNVV

SEQ ID NO: 124248 - protein, 29 aa, Artificial Sequence
  Cyclic GFR-binding peptide
SNITVQIMEYVRKKPKLIGEMSDAANNVV

SEQ ID NO: 124249 - protein, 27 aa, Artificial Sequence
  Cyclic GFR-binding peptide
EPLPMVYYDEYDKVVEQLSNDAANNVV

SEQ ID NO: 124250 - protein, 27 aa, Artificial Sequence
  Cyclic GFR-binding peptide
RPVQIRKIVGRTPKVKKATVDAANNVV

SEQ ID NO: 124251 - protein, 29 aa, Artificial Sequence
  Cyclic GFR-binding peptide
EPLTVLYYEYVRKKPKLEQLSNDAANNVV

SEQ ID NO: 124252 - protein, 27 aa, Artificial Sequence
  Cyclic GFR-binding peptide
SNITIQIMVGRKPKVIGEMSDAANNVV

SEQ ID NO: 124253 - protein, 27 aa, Artificial Sequence
  Cyclic GFR-binding peptide
SNITMQIMDENEKVVIGEMSDAANNVV

SEQ ID NO: 124254 - protein, 27 aa, Artificial Sequence
  Cyclic GFR-binding peptide
SNITIQIMIGKTPKIIGEMSDAANNVV

SEQ ID NO: 124255 - protein, 29 aa, Artificial Sequence
  Cyclic GFR-binding peptide
EPLTMLYYRIKPHQGQHEQLSNDAANNVV

SEQ ID NO: 124256 - protein, 27 aa, Artificial Sequence
  Cyclic GFR-binding peptide
RPVQMRKIDEYDKVVKKATVDAANNVV

SEQ ID NO: 124257 - protein, 29 aa, Artificial Sequence
  Cyclic GFR-binding peptide
EPLPMVYYRIKPHQGQHEQLSNDAANNVV

SEQ ID NO: 124258 - protein, 29 aa, Artificial Sequence
  Cyclic GFR-binding peptide
EPLPVVYYEYVRKKPKLEQLSNDAANNVV

SEQ ID NO: 124259 - protein, 29 aa, Artificial Sequence
  Cyclic GFR-binding peptide
RPVQVRKIEIVRKKPIFKKATVDAANNVV

SEQ ID NO: 124260 - protein, 27 aa, Artificial Sequence
  Cyclic GFR-binding peptide
RSVKMAKVDEYDKVVKEVQVDAANNVV

SEQ ID NO: 124261 - protein, 27 aa, Artificial Sequence
  Cyclic GFR-binding peptide
DAANNVVRYKKLIIQQKDNFYLMSIAN

SEQ ID NO: 124262 - protein, 27 aa, Artificial Sequence
  Cyclic GFR-binding peptide
DAANNVVRYKKLIVNNSSDFYLVSIAN

SEQ ID NO: 124263 - protein, 27 aa, Artificial Sequence
  Cyclic GFR-binding peptide
DAANNVVRYKKLYTVVGKDFYLISIAN

SEQ ID NO: 124264 - protein, 27 aa, Artificial Sequence
  Cyclic GFR-binding peptide
DAANNVVRYKKLIVNSSDDFYLVSIAN

SEQ ID NO: 124265 - protein, 27 aa, Artificial Sequence
  Cyclic GFR-binding peptide
DAANNVVRYKKLVVKDYEDFYLMSIAN

SEQ ID NO: 124266 - protein, 27 aa, Artificial Sequence
  Cyclic GFR-binding peptide
DAANNVVRYKKLLLVRGNDFYLMSIAN

SEQ ID NO: 124267 - protein, 27 aa, Artificial Sequence
  Cyclic GFR-binding peptide
DAANNVVRYKKLVVKENEDFYLMSIAN

SEQ ID NO: 124268 - protein, 27 aa, Artificial Sequence
  Cyclic GFR-binding peptide
DAANNVVRYKKLVVNNAADFYLISIAN

SEQ ID NO: 124269 - protein, 27 aa, Artificial Sequence
  Cyclic GFR-binding peptide
DAANNVVRYKKLTPVGMDDFYLVSIAN

SEQ ID NO: 124270 - protein, 27 aa, Artificial Sequence
  Cyclic GFR-binding peptide
DAANNVVRYKKLVVNNASDFYLISIAN

SEQ ID NO: 124271 - protein, 27 aa, Artificial Sequence
  Cyclic GFR-binding peptide
NAISMLYFNDKQQIILKKYRDAANNVV

SEQ ID NO: 124272 - protein, 27 aa, Artificial Sequence
  Cyclic GFR-binding peptide
NAISVLYFDSSNNVILKKYRDAANNVV

SEQ ID NO: 124273 - protein, 27 aa, Artificial Sequence
  Cyclic GFR-binding peptide
NAISILYFDKGVVTYLKKYRDAANNVV

SEQ ID NO: 124274 - protein, 27 aa, Artificial Sequence
  Cyclic GFR-binding peptide
NAISVLYFDDSSNVILKKYRDAANNVV

SEQ ID NO: 124275 - protein, 27 aa, Artificial Sequence
  Cyclic GFR-binding peptide
NAISMLYFDEYDKVVLKKYRDAANNVV

SEQ ID NO: 124276 - protein, 27 aa, Artificial Sequence
  Cyclic GFR-binding peptide
NAISMLYFDNGRVLLLKKYRDAANNVV

SEQ ID NO: 124277 - protein, 27 aa, Artificial Sequence
  Cyclic GFR-binding peptide
NAISMLYFDENEKVVLKKYRDAANNVV

SEQ ID NO: 124278 - protein, 27 aa, Artificial Sequence
  Cyclic GFR-binding peptide
NAISILYFDAANNVVLKKYRDAANNVV

SEQ ID NO: 124279 - protein, 27 aa, Artificial Sequence
  Cyclic GFR-binding peptide
NAISVLYFDDMGVPTLKKYRDAANNVV

SEQ ID NO: 124280 - protein, 27 aa, Artificial Sequence
  Cyclic GFR-binding peptide
NAISILYFDSANNVVLKKYRDAANNVV

SEQ ID NO: 124281 - protein, 27 aa, Artificial Sequence
  Cyclic GFR-binding peptide
DAANNVVEYKFKVKPTRGVLYLISIPE

SEQ ID NO: 124282 - protein, 27 aa, Artificial Sequence
  Cyclic GFR-binding peptide
DAANNVVYHYKLVVKDYEDKYLMSIPS

SEQ ID NO: 124283 - protein, 27 aa, Artificial Sequence
  Cyclic GFR-binding peptide
DAANNVVEYKFKTPVGMDDLYLVSIPE

SEQ ID NO: 124284 - protein, 27 aa, Artificial Sequence
  Cyclic GFR-binding peptide
DAANNVVRYKKLVVKDYEDFYLMSIAN

SEQ ID NO: 124285 - protein, 27 aa, Artificial Sequence
  Cyclic GFR-binding peptide
DAANNVVRHKRLVKPKRGVYYLISTAS

SEQ ID NO: 124286 - protein, 27 aa, Artificial Sequence
  Cyclic GFR-binding peptide
DAANNVVYHYKLVKPKRGVKYLISIPS

SEQ ID NO: 124287 - protein, 27 aa, Artificial Sequence
  Cyclic GFR-binding peptide
DAANNVVEYKFKIKPTKGILYLISIPE

SEQ ID NO: 124288 - protein, 27 aa, Artificial Sequence
  Cyclic GFR-binding peptide
DAANNVVEYKFKVVNKNEDLYLISIPE

SEQ ID NO: 124289 - protein, 27 aa, Artificial Sequence
  Cyclic GFR-binding peptide
DAANNVVPIKGYVKPTRGVFYLINIPS

SEQ ID NO: 124290 - protein, 27 aa, Artificial Sequence
  Cyclic GFR-binding peptide
DAANNVVPIKGYVVKENEDFYLMNIPS

SEQ ID NO: 124291 - protein, 27 aa, Artificial Sequence
  Cyclic GFR-binding peptide
DAANNVVYHYKLYTVVGKDKYLISIPS

SEQ ID NO: 124292 - protein, 27 aa, Artificial Sequence
  Cyclic GFR-binding peptide
DAANNVVEYKFKLLVRGNDLYLMSIPE

SEQ ID NO: 124293 - protein, 27 aa, Artificial Sequence
  Cyclic GFR-binding peptide
DAANNVVRYKKLVKPKRGVFYLISIAN

SEQ ID NO: 124294 - protein, 27 aa, Artificial Sequence
  Cyclic GFR-binding peptide
DAANNVVPIKGYTPVGMDDFYLVNIPS

SEQ ID NO: 124295 - protein, 27 aa, Artificial Sequence
  Cyclic GFR-binding peptide
DAANNVVYHYKLVVNKNEDKYLISIPS

SEQ ID NO: 124296 - protein, 27 aa, Artificial Sequence
  Cyclic GFR-binding peptide
DAANNVVYHYKLIVNSSDDKYLVSIPS

SEQ ID NO: 124297 - protein, 27 aa, Artificial Sequence
  Cyclic GFR-binding peptide
DAANNVVPIKGYIVNSSDDFYLVNIPS

SEQ ID NO: 124298 - protein, 27 aa, Artificial Sequence
  Cyclic GFR-binding peptide
DAANNVVRYKKLYTVVGKDFYLISIAN

SEQ ID NO: 124299 - protein, 27 aa, Artificial Sequence
  Cyclic GFR-binding peptide
DAANNVVRHKRLLLVRGNDYYLMSTAS

SEQ ID NO: 124300 - protein, 27 aa, Artificial Sequence
  Cyclic GFR-binding peptide
DAANNVVYHYKLLLVRGNDKYLMSIPS

SEQ ID NO: 124301 - protein, 27 aa, Artificial Sequence
  Cyclic GFR-binding peptide
DAANNVVRYKKLIVNSSDDFYLVSIAN

SEQ ID NO: 124302 - protein, 27 aa, Artificial Sequence
  Cyclic GFR-binding peptide
DAANNVVRHKRLVVNKNEDYYLISTAS

SEQ ID NO: 124303 - protein, 27 aa, Artificial Sequence
  Cyclic GFR-binding peptide
DAANNVVRHKRLIKPTKGIYYLISTAS

SEQ ID NO: 124304 - protein, 27 aa, Artificial Sequence
  Cyclic GFR-binding peptide
DAANNVVPIKGYYTVVGKDFYLINIPS

SEQ ID NO: 124305 - protein, 27 aa, Artificial Sequence
  Cyclic GFR-binding peptide
DAANNVVYHYKLTPVGMDDKYLVSIPS

SEQ ID NO: 124306 - protein, 27 aa, Artificial Sequence
  Cyclic GFR-binding peptide
DAANNVVRHKRLIVNNSSDYYLVSTAS

SEQ ID NO: 124307 - protein, 27 aa, Artificial Sequence
  Cyclic GFR-binding peptide
DAANNVVRYKKLLLVRGNDFYLMSIAN

SEQ ID NO: 124308 - protein, 27 aa, Artificial Sequence
  Cyclic GFR-binding peptide
DAANNVVYHYKLVKPTRGVKYLISIPS

SEQ ID NO: 124309 - protein, 27 aa, Artificial Sequence
  Cyclic GFR-binding peptide
DAANNVVRHKRLIVNSSDDYYLVSTAS

SEQ ID NO: 124310 - protein, 27 aa, Artificial Sequence
  Cyclic GFR-binding peptide
DAANNVVPIKGYLLVRGNDFYLMNIPS

SEQ ID NO: 124311 - protein, 27 aa, Artificial Sequence
  Cyclic GFR-binding peptide
DAANNVVRYKKLVVNKNEDFYLISIAN

SEQ ID NO: 124312 - protein, 27 aa, Artificial Sequence
  Cyclic GFR-binding peptide
DAANNVVEYKFKVVKDYEDLYLMSIPE

SEQ ID NO: 124313 - protein, 27 aa, Artificial Sequence
  Cyclic GFR-binding peptide
DAANNVVPIKGYVVNKNEDFYLINIPS

SEQ ID NO: 124314 - protein, 27 aa, Artificial Sequence
  Cyclic GFR-binding peptide
DAANNVVPIKGYIKPTKGIFYLINIPS

SEQ ID NO: 124315 - protein, 27 aa, Artificial Sequence
  Cyclic GFR-binding peptide
DAANNVVEYKFKVVNNAADLYLISIPE

SEQ ID NO: 124316 - protein, 27 aa, Artificial Sequence
  Cyclic GFR-binding peptide
DAANNVVRHKRLYTVVGKDYYLISTAS

SEQ ID NO: 124317 - protein, 27 aa, Artificial Sequence
  Cyclic GFR-binding peptide
DAANNVVRYKKLIKPTKGIFYLISIAN

SEQ ID NO: 124318 - protein, 27 aa, Artificial Sequence
  Cyclic GFR-binding peptide
DAANNVVPIKGYVVKDYEDFYLMNIPS

SEQ ID NO: 124319 - protein, 27 aa, Artificial Sequence
  Cyclic GFR-binding peptide
DAANNVVEYKFKVVNNASDLYLISIPE

SEQ ID NO: 124320 - protein, 27 aa, Artificial Sequence
  Cyclic GFR-binding peptide
DAANNVVRYKKLVKPTRGVFYLISIAN

SEQ ID NO: 124321 - protein, 27 aa, Artificial Sequence
  Cyclic GFR-binding peptide
DAANNVVRHKRLVVKENEDYYLMSTAS

SEQ ID NO: 124322 - protein, 27 aa, Artificial Sequence
  Cyclic GFR-binding peptide
DAANNVVYHYKLIKPTKGIKYLISIPS

SEQ ID NO: 124323 - protein, 27 aa, Artificial Sequence
  Cyclic GFR-binding peptide
DAANNVVYHYKLVVKENEDKYLMSIPS

SEQ ID NO: 124324 - protein, 27 aa, Artificial Sequence
  Cyclic GFR-binding peptide
DAANNVVRHKRLIIQQKDNYYLMSTAS

SEQ ID NO: 124325 - protein, 27 aa, Artificial Sequence
  Cyclic GFR-binding peptide
DAANNVVRYKKLVVKENEDFYLMSIAN

SEQ ID NO: 124326 - protein, 27 aa, Artificial Sequence
  Cyclic GFR-binding peptide
DAANNVVRYKKLVVNNAADFYLISIAN

SEQ ID NO: 124327 - protein, 27 aa, Artificial Sequence
  Cyclic GFR-binding peptide
DAANNVVEYKFKIIQQKDNLYLMSIPE

SEQ ID NO: 124328 - protein, 27 aa, Artificial Sequence
  Cyclic GFR-binding peptide
DAANNVVRYKKLTPVGMDDFYLVSIAN

SEQ ID NO: 124329 - protein, 27 aa, Artificial Sequence
  Cyclic GFR-binding peptide
DAANNVVYHYKLVVNNAADKYLISIPS

SEQ ID NO: 124330 - protein, 27 aa, Artificial Sequence
  Cyclic GFR-binding peptide
DAANNVVPIKGYIVNNSSDFYLVNIPS

SEQ ID NO: 124331 - protein, 27 aa, Artificial Sequence
  Cyclic GFR-binding peptide
DAANNVVPIKGYVKPKRGVFYLINIPS

SEQ ID NO: 124332 - protein, 27 aa, Artificial Sequence
  Cyclic GFR-binding peptide
DAANNVVRYKKLIIQQKDNFYLMSIAN

SEQ ID NO: 124333 - protein, 27 aa, Artificial Sequence
  Cyclic GFR-binding peptide
DAANNVVPIKGYIIQQKDNFYLMNIPS

SEQ ID NO: 124334 - protein, 27 aa, Artificial Sequence
  Cyclic GFR-binding peptide
DAANNVVRYKKLIVNNSSDFYLVSIAN

SEQ ID NO: 124335 - protein, 27 aa, Artificial Sequence
  Cyclic GFR-binding peptide
DAANNVVPIKGYVVNNAADFYLINIPS

SEQ ID NO: 124336 - protein, 27 aa, Artificial Sequence
  Cyclic GFR-binding peptide
DAANNVVRHKRLVKPTRGVYYLISTAS

SEQ ID NO: 124337 - protein, 27 aa, Artificial Sequence
  Cyclic GFR-binding peptide
DAANNVVEYKFKIVNNSSDLYLVSIPE

SEQ ID NO: 124338 - protein, 27 aa, Artificial Sequence
  Cyclic GFR-binding peptide
DAANNVVRHKRLVVNNASDYYLISTAS

SEQ ID NO: 124339 - protein, 27 aa, Artificial Sequence
  Cyclic GFR-binding peptide
DAANNVVRHKRLTPVGMDDYYLVSTAS

SEQ ID NO: 124340 - protein, 27 aa, Artificial Sequence
  Cyclic GFR-binding peptide
DAANNVVYHYKLIVNNSSDKYLVSIPS

SEQ ID NO: 124341 - protein, 27 aa, Artificial Sequence
  Cyclic GFR-binding peptide
DAANNVVYHYKLVVNNASDKYLISIPS

SEQ ID NO: 124342 - protein, 27 aa, Artificial Sequence
  Cyclic GFR-binding peptide
DAANNVVEYKFKIVNSSDDLYLVSIPE

SEQ ID NO: 124343 - protein, 27 aa, Artificial Sequence
  Cyclic GFR-binding peptide
DAANNVVEYKFKVKPKRGVLYLISIPE

SEQ ID NO: 124344 - protein, 27 aa, Artificial Sequence
  Cyclic GFR-binding peptide
DAANNVVRHKRLVVKDYEDYYLMSTAS

SEQ ID NO: 124345 - protein, 27 aa, Artificial Sequence
  Cyclic GFR-binding peptide
DAANNVVEYKFKVVKENEDLYLMSIPE

SEQ ID NO: 124346 - protein, 27 aa, Artificial Sequence
  Cyclic GFR-binding peptide
DAANNVVEYKFKYTVVGKDLYLISIPE

SEQ ID NO: 124347 - protein, 27 aa, Artificial Sequence
  Cyclic GFR-binding peptide
DAANNVVPIKGYVVNNASDFYLINIPS

SEQ ID NO: 124348 - protein, 27 aa, Artificial Sequence
  Cyclic GFR-binding peptide
DAANNVVYHYKLIIQQKDNKYLMSIPS

SEQ ID NO: 124349 - protein, 27 aa, Artificial Sequence
  Cyclic GFR-binding peptide
DAANNVVRYKKLVVNNASDFYLISIAN

SEQ ID NO: 124350 - protein, 27 aa, Artificial Sequence
  Cyclic GFR-binding peptide
DAANNVVRHKRLVVNNAADYYLISTAS

SEQ ID NO: 124351 - protein, 27 aa, Artificial Sequence
  Cyclic GFR-binding peptide
EPISILYLVGRTPKVKFKYEDAANNVV

SEQ ID NO: 124352 - protein, 27 aa, Artificial Sequence
  Cyclic GFR-binding peptide
SPISMLYKDEYDKVVLKYHYDAANNVV

SEQ ID NO: 124353 - protein, 27 aa, Artificial Sequence
  Cyclic GFR-binding peptide
EPISVLYLDDMGVPTKFKYEDAANNVV

SEQ ID NO: 124354 - protein, 27 aa, Artificial Sequence
  Cyclic GFR-binding peptide
NAISMLYFDEYDKVVLKKYRDAANNVV

SEQ ID NO: 124355 - protein, 27 aa, Artificial Sequence
  Cyclic GFR-binding peptide
SATSILYYVGRKPKVLRKHRDAANNVV

SEQ ID NO: 124356 - protein, 27 aa, Artificial Sequence
  Cyclic GFR-binding peptide
SPISILYKVGRKPKVLKYHYDAANNVV

SEQ ID NO: 124357 - protein, 27 aa, Artificial Sequence
  Cyclic GFR-binding peptide
EPISILYLIGKTPKIKFKYEDAANNVV

SEQ ID NO: 124358 - protein, 27 aa, Artificial Sequence
  Cyclic GFR-binding peptide
EPISILYLDENKNVVKFKYEDAANNVV

SEQ ID NO: 124359 - protein, 27 aa, Artificial Sequence
  Cyclic GFR-binding peptide
SPINILYFVGRTPKVYGKIPDAANNVV

SEQ ID NO: 124360 - protein, 27 aa, Artificial Sequence
  Cyclic GFR-binding peptide
SPINMLYFDENEKVVYGKIPDAANNVV

SEQ ID NO: 124361 - protein, 27 aa, Artificial Sequence
  Cyclic GFR-binding peptide
SPISILYKDKGVVTYLKYHYDAANNVV

SEQ ID NO: 124362 - protein, 27 aa, Artificial Sequence
  Cyclic GFR-binding peptide
EPISMLYLDNGRVLLKFKYEDAANNVV

SEQ ID NO: 124363 - protein, 27 aa, Artificial Sequence
  Cyclic GFR-binding peptide
NAISILYFVGRKPKVLKKYRDAANNVV

SEQ ID NO: 124364 - protein, 27 aa, Artificial Sequence
  Cyclic GFR-binding peptide
SPINVLYFDDMGVPTYGKIPDAANNVV

SEQ ID NO: 124365 - protein, 27 aa, Artificial Sequence
  Cyclic GFR-binding peptide
SPISILYKDENKNVVLKYHYDAANNVV

SEQ ID NO: 124366 - protein, 27 aa, Artificial Sequence
  Cyclic GFR-binding peptide
SPISVLYKDDSSNVILKYHYDAANNVV

SEQ ID NO: 124367 - protein, 27 aa, Artificial Sequence
  Cyclic GFR-binding peptide
SPINVLYFDDSSNVIYGKIPDAANNVV

SEQ ID NO: 124368 - protein, 27 aa, Artificial Sequence
  Cyclic GFR-binding peptide
NAISILYFDKGVVTYLKKYRDAANNVV

SEQ ID NO: 124369 - protein, 27 aa, Artificial Sequence
  Cyclic GFR-binding peptide
SATSMLYYDNGRVLLLRKHRDAANNVV

SEQ ID NO: 124370 - protein, 27 aa, Artificial Sequence
  Cyclic GFR-binding peptide
SPISMLYKDNGRVLLLKYHYDAANNVV

SEQ ID NO: 124371 - protein, 27 aa, Artificial Sequence
  Cyclic GFR-binding peptide
NAISVLYFDDSSNVILKKYRDAANNVV

SEQ ID NO: 124372 - protein, 27 aa, Artificial Sequence
  Cyclic GFR-binding peptide
SATSILYYDENKNVVLRKHRDAANNVV

SEQ ID NO: 124373 - protein, 27 aa, Artificial Sequence
  Cyclic GFR-binding peptide
SATSILYYIGKTPKILRKHRDAANNVV

SEQ ID NO: 124374 - protein, 27 aa, Artificial Sequence
  Cyclic GFR-binding peptide
SPINILYFDKGVVTYYGKIPDAANNVV

SEQ ID NO: 124375 - protein, 27 aa, Artificial Sequence
  Cyclic GFR-binding peptide
SPISVLYKDDMGVPTLKYHYDAANNVV

SEQ ID NO: 124376 - protein, 27 aa, Artificial Sequence
  Cyclic GFR-binding peptide
SATSVLYYDSSNNVILRKHRDAANNVV

SEQ ID NO: 124377 - protein, 27 aa, Artificial Sequence
  Cyclic GFR-binding peptide
NAISMLYFDNGRVLLLKKYRDAANNVV

SEQ ID NO: 124378 - protein, 27 aa, Artificial Sequence
  Cyclic GFR-binding peptide
SPISILYKVGRTPKVLKYHYDAANNVV

SEQ ID NO: 124379 - protein, 27 aa, Artificial Sequence
  Cyclic GFR-binding peptide
SATSVLYYDDSSNVILRKHRDAANNVV

SEQ ID NO: 124380 - protein, 27 aa, Artificial Sequence
  Cyclic GFR-binding peptide
SPINMLYFDNGRVLLYGKIPDAANNVV

SEQ ID NO: 124381 - protein, 27 aa, Artificial Sequence
  Cyclic GFR-binding peptide
NAISILYFDENKNVVLKKYRDAANNVV

SEQ ID NO: 124382 - protein, 27 aa, Artificial Sequence
  Cyclic GFR-binding peptide
EPISMLYLDEYDKVVKFKYEDAANNVV

SEQ ID NO: 124383 - protein, 27 aa, Artificial Sequence
  Cyclic GFR-binding peptide
SPINILYFDENKNVVYGKIPDAANNVV

SEQ ID NO: 124384 - protein, 27 aa, Artificial Sequence
  Cyclic GFR-binding peptide
SPINILYFIGKTPKIYGKIPDAANNVV

SEQ ID NO: 124385 - protein, 27 aa, Artificial Sequence
  Cyclic GFR-binding peptide
EPISILYLDAANNVVKFKYEDAANNVV

SEQ ID NO: 124386 - protein, 27 aa, Artificial Sequence
  Cyclic GFR-binding peptide
SATSILYYDKGVVTYLRKHRDAANNVV

SEQ ID NO: 124387 - protein, 27 aa, Artificial Sequence
  Cyclic GFR-binding peptide
NAISILYFIGKTPKILKKYRDAANNVV

SEQ ID NO: 124388 - protein, 27 aa, Artificial Sequence
  Cyclic GFR-binding peptide
SPINMLYFDEYDKVVYGKIPDAANNVV

SEQ ID NO: 124389 - protein, 27 aa, Artificial Sequence
  Cyclic GFR-binding peptide
EPISILYLDSANNVVKFKYEDAANNVV

SEQ ID NO: 124390 - protein, 27 aa, Artificial Sequence
  Cyclic GFR-binding peptide
NAISILYFVGRTPKVLKKYRDAANNVV

SEQ ID NO: 124391 - protein, 27 aa, Artificial Sequence
  Cyclic GFR-binding peptide
SATSMLYYDENEKVVLRKHRDAANNVV

SEQ ID NO: 124392 - protein, 27 aa, Artificial Sequence
  Cyclic GFR-binding peptide
SPISILYKIGKTPKILKYHYDAANNVV

SEQ ID NO: 124393 - protein, 27 aa, Artificial Sequence
  Cyclic GFR-binding peptide
SPISMLYKDENEKVVLKYHYDAANNVV

SEQ ID NO: 124394 - protein, 27 aa, Artificial Sequence
  Cyclic GFR-binding peptide
SATSMLYYNDKQQIILRKHRDAANNVV

SEQ ID NO: 124395 - protein, 27 aa, Artificial Sequence
  Cyclic GFR-binding peptide
NAISMLYFDENEKVVLKKYRDAANNVV

SEQ ID NO: 124396 - protein, 27 aa, Artificial Sequence
  Cyclic GFR-binding peptide
NAISILYFDAANNVVLKKYRDAANNVV

SEQ ID NO: 124397 - protein, 27 aa, Artificial Sequence
  Cyclic GFR-binding peptide
EPISMLYLNDKQQIIKFKYEDAANNVV

SEQ ID NO: 124398 - protein, 27 aa, Artificial Sequence
  Cyclic GFR-binding peptide
NAISVLYFDDMGVPTLKKYRDAANNVV

SEQ ID NO: 124399 - protein, 27 aa, Artificial Sequence
  Cyclic GFR-binding peptide
SPISILYKDAANNVVLKYHYDAANNVV

SEQ ID NO: 124400 - protein, 27 aa, Artificial Sequence
  Cyclic GFR-binding peptide
SPINVLYFDSSNNVIYGKIPDAANNVV

SEQ ID NO: 124401 - protein, 27 aa, Artificial Sequence
  Cyclic GFR-binding peptide
SPINILYFVGRKPKVYGKIPDAANNVV

SEQ ID NO: 124402 - protein, 27 aa, Artificial Sequence
  Cyclic GFR-binding peptide
NAISMLYFNDKQQIILKKYRDAANNVV

SEQ ID NO: 124403 - protein, 27 aa, Artificial Sequence
  Cyclic GFR-binding peptide
SPINMLYFNDKQQIIYGKIPDAANNVV

SEQ ID NO: 124404 - protein, 27 aa, Artificial Sequence
  Cyclic GFR-binding peptide
NAISVLYFDSSNNVILKKYRDAANNVV

SEQ ID NO: 124405 - protein, 27 aa, Artificial Sequence
  Cyclic GFR-binding peptide
SPINILYFDAANNVVYGKIPDAANNVV

SEQ ID NO: 124406 - protein, 27 aa, Artificial Sequence
  Cyclic GFR-binding peptide
SATSILYYVGRTPKVLRKHRDAANNVV

SEQ ID NO: 124407 - protein, 27 aa, Artificial Sequence
  Cyclic GFR-binding peptide
EPISVLYLDSSNNVIKFKYEDAANNVV

SEQ ID NO: 124408 - protein, 27 aa, Artificial Sequence
  Cyclic GFR-binding peptide
SATSILYYDSANNVVLRKHRDAANNVV

SEQ ID NO: 124409 - protein, 27 aa, Artificial Sequence
  Cyclic GFR-binding peptide
SATSVLYYDDMGVPTLRKHRDAANNVV

SEQ ID NO: 124410 - protein, 27 aa, Artificial Sequence
  Cyclic GFR-binding peptide
SPISVLYKDSSNNVILKYHYDAANNVV

SEQ ID NO: 124411 - protein, 27 aa, Artificial Sequence
  Cyclic GFR-binding peptide
SPISILYKDSANNVVLKYHYDAANNVV

SEQ ID NO: 124412 - protein, 27 aa, Artificial Sequence
  Cyclic GFR-binding peptide
EPISVLYLDDSSNVIKFKYEDAANNVV

SEQ ID NO: 124413 - protein, 27 aa, Artificial Sequence
  Cyclic GFR-binding peptide
EPISILYLVGRKPKVKFKYEDAANNVV

SEQ ID NO: 124414 - protein, 27 aa, Artificial Sequence
  Cyclic GFR-binding peptide
SATSMLYYDEYDKVVLRKHRDAANNVV

SEQ ID NO: 124415 - protein, 27 aa, Artificial Sequence
  Cyclic GFR-binding peptide
EPISMLYLDENEKVVKFKYEDAANNVV

SEQ ID NO: 124416 - protein, 27 aa, Artificial Sequence
  Cyclic GFR-binding peptide
EPISILYLDKGVVTYKFKYEDAANNVV

SEQ ID NO: 124417 - protein, 27 aa, Artificial Sequence
  Cyclic GFR-binding peptide
SPINILYFDSANNVVYGKIPDAANNVV

SEQ ID NO: 124418 - protein, 27 aa, Artificial Sequence
  Cyclic GFR-binding peptide
SPISMLYKNDKQQIILKYHYDAANNVV

SEQ ID NO: 124419 - protein, 27 aa, Artificial Sequence
  Cyclic GFR-binding peptide
NAISILYFDSANNVVLKKYRDAANNVV

SEQ ID NO: 124420 - protein, 27 aa, Artificial Sequence
  Cyclic GFR-binding peptide
SATSILYYDAANNVVLRKHRDAANNVV

SEQ ID NO: 124421 - protein, 27 aa, Artificial Sequence
  Cyclic GFR-binding peptide
DAANNVVSMEGIIIQQKDNMIQMTINS

SEQ ID NO: 124422 - protein, 27 aa, Artificial Sequence
  Cyclic GFR-binding peptide
DAANNVVSMEGIIVNSSDDMIQVTINS

SEQ ID NO: 124423 - protein, 27 aa, Artificial Sequence
  Cyclic GFR-binding peptide
DAANNVVSMEGLVKPKRGVMIQITINS

SEQ ID NO: 124424 - protein, 27 aa, Artificial Sequence
  Cyclic GFR-binding peptide
DAANNVVSMEGLVVNNASDMIQITINS

SEQ ID NO: 124425 - protein, 29 aa, Artificial Sequence
  Cyclic GFR-binding peptide
DAANNVVSMEGIFIPKKRVIEMIQVTINS

SEQ ID NO: 124426 - protein, 27 aa, Artificial Sequence
  Cyclic GFR-binding peptide
DAANNVVSMEGILLVRGNDMIQMTINS

SEQ ID NO: 124427 - protein, 29 aa, Artificial Sequence
  Cyclic GFR-binding peptide
DAANNVVSMEGILKPKKRVYEMIQVTINS

SEQ ID NO: 124428 - protein, 27 aa, Artificial Sequence
  Cyclic GFR-binding peptide
DAANNVVSMEGLIKPTKGIMIQITINS

SEQ ID NO: 124429 - protein, 27 aa, Artificial Sequence
  Cyclic GFR-binding peptide
DAANNVVSMEGLIVNSSDDMIQVTINS

SEQ ID NO: 124430 - protein, 29 aa, Artificial Sequence
  Cyclic GFR-binding peptide
DAANNVVSMEGIHQGQHPKIRMIQMTINS

SEQ ID NO: 124431 - protein, 27 aa, Artificial Sequence
  Cyclic GFR-binding peptide
DAANNVVSMEGIVVNNASDMIQITINS

SEQ ID NO: 124432 - protein, 29 aa, Artificial Sequence
  Cyclic GFR-binding peptide
DAANNVVSMEGLLKPKKRVYEMIQVTINS

SEQ ID NO: 124433 - protein, 27 aa, Artificial Sequence
  Cyclic GFR-binding peptide
DAANNVVSMEGIVKPKRGVMIQITINS

SEQ ID NO: 124434 - protein, 27 aa, Artificial Sequence
  Cyclic GFR-binding peptide
DAANNVVSMEGIVKPTRGVMIQITINS

SEQ ID NO: 124435 - protein, 27 aa, Artificial Sequence
  Cyclic GFR-binding peptide
DAANNVVSMEGLVVNNAADMIQITINS

SEQ ID NO: 124436 - protein, 27 aa, Artificial Sequence
  Cyclic GFR-binding peptide
DAANNVVSMEGLLLVRGNDMIQMTINS

SEQ ID NO: 124437 - protein, 27 aa, Artificial Sequence
  Cyclic GFR-binding peptide
DAANNVVSMEGIIKPTKGIMIQITINS

SEQ ID NO: 124438 - protein, 27 aa, Artificial Sequence
  Cyclic GFR-binding peptide
DAANNVVSMEGLIIQQKDNMIQMTINS

SEQ ID NO: 124439 - protein, 29 aa, Artificial Sequence
  Cyclic GFR-binding peptide
DAANNVVSMEGLHQGQHPKIRMIQMTINS

SEQ ID NO: 124440 - protein, 27 aa, Artificial Sequence
  Cyclic GFR-binding peptide
DAANNVVSMEGIVVNNAADMIQITINS

SEQ ID NO: 124441 - protein, 29 aa, Artificial Sequence
  Cyclic GFR-binding peptide
DAANNVVSMEGLFIPKKRVIEMIQVTINS

SEQ ID NO: 124442 - protein, 27 aa, Artificial Sequence
  Cyclic GFR-binding peptide
DAANNVVSMEGLVKPTRGVMIQITINS

SEQ ID NO: 124443 - protein, 27 aa, Artificial Sequence
  Cyclic GFR-binding peptide
SNITMQIMNDKQQIIIGEMSDAANNVV

SEQ ID NO: 124444 - protein, 27 aa, Artificial Sequence
  Cyclic GFR-binding peptide
SNITVQIMDDSSNVIIGEMSDAANNVV

SEQ ID NO: 124445 - protein, 27 aa, Artificial Sequence
  Cyclic GFR-binding peptide
SNITIQIMVGRKPKVLGEMSDAANNVV

SEQ ID NO: 124446 - protein, 27 aa, Artificial Sequence
  Cyclic GFR-binding peptide
SNITIQIMDSANNVVLGEMSDAANNVV

SEQ ID NO: 124447 - protein, 29 aa, Artificial Sequence
  Cyclic GFR-binding peptide
SNITVQIMEIVRKKPIFIGEMSDAANNVV

SEQ ID NO: 124448 - protein, 27 aa, Artificial Sequence
  Cyclic GFR-binding peptide
SNITMQIMDNGRVLLIGEMSDAANNVV

SEQ ID NO: 124449 - protein, 29 aa, Artificial Sequence
  Cyclic GFR-binding peptide
SNITVQIMEYVRKKPKLIGEMSDAANNVV

SEQ ID NO: 124450 - protein, 27 aa, Artificial Sequence
  Cyclic GFR-binding peptide
SNITIQIMIGKTPKILGEMSDAANNVV

SEQ ID NO: 124451 - protein, 27 aa, Artificial Sequence
  Cyclic GFR-binding peptide
SNITVQIMDDSSNVILGEMSDAANNVV

SEQ ID NO: 124452 - protein, 29 aa, Artificial Sequence
  Cyclic GFR-binding peptide
SNITMQIMRIKPHQGQHIGEMSDAANNVV

SEQ ID NO: 124453 - protein, 27 aa, Artificial Sequence
  Cyclic GFR-binding peptide
SNITIQIMDSANNVVIGEMSDAANNVV

SEQ ID NO: 124454 - protein, 29 aa, Artificial Sequence
  Cyclic GFR-binding peptide
SNITVQIMEYVRKKPKLLGEMSDAANNVV

SEQ ID NO: 124455 - protein, 27 aa, Artificial Sequence
  Cyclic GFR-binding peptide
SNITIQIMVGRKPKVIGEMSDAANNVV

SEQ ID NO: 124456 - protein, 27 aa, Artificial Sequence
  Cyclic GFR-binding peptide
SNITIQIMVGRTPKVIGEMSDAANNVV

SEQ ID NO: 124457 - protein, 27 aa, Artificial Sequence
  Cyclic GFR-binding peptide
SNITIQIMDAANNVVLGEMSDAANNVV

SEQ ID NO: 124458 - protein, 27 aa, Artificial Sequence
  Cyclic GFR-binding peptide
SNITMQIMDNGRVLLLGEMSDAANNVV

SEQ ID NO: 124459 - protein, 27 aa, Artificial Sequence
  Cyclic GFR-binding peptide
SNITIQIMIGKTPKIIGEMSDAANNVV

SEQ ID NO: 124460 - protein, 27 aa, Artificial Sequence
  Cyclic GFR-binding peptide
SNITMQIMNDKQQIILGEMSDAANNVV

SEQ ID NO: 124461 - protein, 29 aa, Artificial Sequence
  Cyclic GFR-binding peptide
SNITMQIMRIKPHQGQHLGEMSDAANNVV

SEQ ID NO: 124462 - protein, 27 aa, Artificial Sequence
  Cyclic GFR-binding peptide
SNITIQIMDAANNVVIGEMSDAANNVV

SEQ ID NO: 124463 - protein, 29 aa, Artificial Sequence
  Cyclic GFR-binding peptide
SNITVQIMEIVRKKPIFLGEMSDAANNVV

SEQ ID NO: 124464 - protein, 27 aa, Artificial Sequence
  Cyclic GFR-binding peptide
SNITIQIMVGRTPKVLGEMSDAANNVV

SEQ ID NO: 124465 - protein, 27 aa, Artificial Sequence
  Cyclic GFR-binding peptide
DAANNVVRYKKLIKPTKGIFYLISIAN

SEQ ID NO: 124466 - protein, 27 aa, Artificial Sequence
  Cyclic GFR-binding peptide
DAANNVVQYNKLVVNKNEDLYLISIAS

SEQ ID NO: 124467 - protein, 27 aa, Artificial Sequence
  Cyclic GFR-binding peptide
DAANNVVQYNKLVVNNAADLYLISIAS

SEQ ID NO: 124468 - protein, 27 aa, Artificial Sequence
  Cyclic GFR-binding peptide
DAANNVVQYNKLIVNNSSDLYLVSIAS

SEQ ID NO: 124469 - protein, 27 aa, Artificial Sequence
  Cyclic GFR-binding peptide
DAANNVVRYKKLVVKDYEDFYLMSIAN

SEQ ID NO: 124470 - protein, 27 aa, Artificial Sequence
  Cyclic GFR-binding peptide
DAANNVVRYKKLVKPTRGVFYLISIAN

SEQ ID NO: 124471 - protein, 27 aa, Artificial Sequence
  Cyclic GFR-binding peptide
DAANNVVQYNKLIIQQKDNLYLMSIAS

SEQ ID NO: 124472 - protein, 27 aa, Artificial Sequence
  Cyclic GFR-binding peptide
DAANNVVQYNKLLLVRGNDLYLMSIAS

SEQ ID NO: 124473 - protein, 27 aa, Artificial Sequence
  Cyclic GFR-binding peptide
DAANNVVQYNKLVKPTRGVLYLISIAS

SEQ ID NO: 124474 - protein, 27 aa, Artificial Sequence
  Cyclic GFR-binding peptide
DAANNVVRYKKLVVKENEDFYLMSIAN

SEQ ID NO: 124475 - protein, 27 aa, Artificial Sequence
  Cyclic GFR-binding peptide
DAANNVVRYKKLVVNNAADFYLISIAN

SEQ ID NO: 124476 - protein, 27 aa, Artificial Sequence
  Cyclic GFR-binding peptide
DAANNVVQYNKLTPVGMDDLYLVSIAS

SEQ ID NO: 124477 - protein, 27 aa, Artificial Sequence
  Cyclic GFR-binding peptide
DAANNVVRYKKLTPVGMDDFYLVSIAN

SEQ ID NO: 124478 - protein, 27 aa, Artificial Sequence
  Cyclic GFR-binding peptide
DAANNVVRYKKLVKPKRGVFYLISIAN

SEQ ID NO: 124479 - protein, 27 aa, Artificial Sequence
  Cyclic GFR-binding peptide
DAANNVVQYNKLVVKENEDLYLMSIAS

SEQ ID NO: 124480 - protein, 27 aa, Artificial Sequence
  Cyclic GFR-binding peptide
DAANNVVRYKKLIIQQKDNFYLMSIAN

SEQ ID NO: 124481 - protein, 27 aa, Artificial Sequence
  Cyclic GFR-binding peptide
DAANNVVQYNKLVKPKRGVLYLISIAS

SEQ ID NO: 124482 - protein, 27 aa, Artificial Sequence
  Cyclic GFR-binding peptide
DAANNVVRYKKLIVNNSSDFYLVSIAN

SEQ ID NO: 124483 - protein, 27 aa, Artificial Sequence
  Cyclic GFR-binding peptide
DAANNVVRYKKLYTVVGKDFYLISIAN

SEQ ID NO: 124484 - protein, 27 aa, Artificial Sequence
  Cyclic GFR-binding peptide
DAANNVVRYKKLIVNSSDDFYLVSIAN

SEQ ID NO: 124485 - protein, 27 aa, Artificial Sequence
  Cyclic GFR-binding peptide
DAANNVVRYKKLLLVRGNDFYLMSIAN

SEQ ID NO: 124486 - protein, 27 aa, Artificial Sequence
  Cyclic GFR-binding peptide
DAANNVVQYNKLVVNNASDLYLISIAS

SEQ ID NO: 124487 - protein, 27 aa, Artificial Sequence
  Cyclic GFR-binding peptide
DAANNVVQYNKLIKPTKGILYLISIAS

SEQ ID NO: 124488 - protein, 27 aa, Artificial Sequence
  Cyclic GFR-binding peptide
DAANNVVRYKKLVVNKNEDFYLISIAN

SEQ ID NO: 124489 - protein, 27 aa, Artificial Sequence
  Cyclic GFR-binding peptide
DAANNVVQYNKLYTVVGKDLYLISIAS

SEQ ID NO: 124490 - protein, 27 aa, Artificial Sequence
  Cyclic GFR-binding peptide
DAANNVVQYNKLVVKDYEDLYLMSIAS

SEQ ID NO: 124491 - protein, 27 aa, Artificial Sequence
  Cyclic GFR-binding peptide
DAANNVVRYKKLVVNNASDFYLISIAN

SEQ ID NO: 124492 - protein, 27 aa, Artificial Sequence
  Cyclic GFR-binding peptide
DAANNVVQYNKLIVNSSDDLYLVSIAS

SEQ ID NO: 124493 - protein, 27 aa, Artificial Sequence
  Cyclic GFR-binding peptide
NAISILYFIGKTPKILKKYRDAANNVV

SEQ ID NO: 124494 - protein, 27 aa, Artificial Sequence
  Cyclic GFR-binding peptide
SAISILYLDENKNVVLKNYQDAANNVV

SEQ ID NO: 124495 - protein, 27 aa, Artificial Sequence
  Cyclic GFR-binding peptide
SAISILYLDAANNVVLKNYQDAANNVV

SEQ ID NO: 124496 - protein, 27 aa, Artificial Sequence
  Cyclic GFR-binding peptide
SAISVLYLDSSNNVILKNYQDAANNVV

SEQ ID NO: 124497 - protein, 27 aa, Artificial Sequence
  Cyclic GFR-binding peptide
NAISMLYFDEYDKVVLKKYRDAANNVV

SEQ ID NO: 124498 - protein, 27 aa, Artificial Sequence
  Cyclic GFR-binding peptide
NAISILYFVGRTPKVLKKYRDAANNVV

SEQ ID NO: 124499 - protein, 27 aa, Artificial Sequence
  Cyclic GFR-binding peptide
SAISMLYLNDKQQIILKNYQDAANNVV

SEQ ID NO: 124500 - protein, 27 aa, Artificial Sequence
  Cyclic GFR-binding peptide
SAISMLYLDNGRVLLLKNYQDAANNVV

SEQ ID NO: 124501 - protein, 27 aa, Artificial Sequence
  Cyclic GFR-binding peptide
SAISILYLVGRTPKVLKNYQDAANNVV

SEQ ID NO: 124502 - protein, 27 aa, Artificial Sequence
  Cyclic GFR-binding peptide
NAISMLYFDENEKVVLKKYRDAANNVV

SEQ ID NO: 124503 - protein, 27 aa, Artificial Sequence
  Cyclic GFR-binding peptide
NAISILYFDAANNVVLKKYRDAANNVV

SEQ ID NO: 124504 - protein, 27 aa, Artificial Sequence
  Cyclic GFR-binding peptide
SAISVLYLDDMGVPTLKNYQDAANNVV

SEQ ID NO: 124505 - protein, 27 aa, Artificial Sequence
  Cyclic GFR-binding peptide
NAISVLYFDDMGVPTLKKYRDAANNVV

SEQ ID NO: 124506 - protein, 27 aa, Artificial Sequence
  Cyclic GFR-binding peptide
NAISILYFVGRKPKVLKKYRDAANNVV

SEQ ID NO: 124507 - protein, 27 aa, Artificial Sequence
  Cyclic GFR-binding peptide
SAISMLYLDENEKVVLKNYQDAANNVV

SEQ ID NO: 124508 - protein, 27 aa, Artificial Sequence
  Cyclic GFR-binding peptide
NAISMLYFNDKQQIILKKYRDAANNVV

SEQ ID NO: 124509 - protein, 27 aa, Artificial Sequence
  Cyclic GFR-binding peptide
SAISILYLVGRKPKVLKNYQDAANNVV

SEQ ID NO: 124510 - protein, 27 aa, Artificial Sequence
  Cyclic GFR-binding peptide
NAISVLYFDSSNNVILKKYRDAANNVV

SEQ ID NO: 124511 - protein, 27 aa, Artificial Sequence
  Cyclic GFR-binding peptide
NAISILYFDKGVVTYLKKYRDAANNVV

SEQ ID NO: 124512 - protein, 27 aa, Artificial Sequence
  Cyclic GFR-binding peptide
NAISVLYFDDSSNVILKKYRDAANNVV

SEQ ID NO: 124513 - protein, 27 aa, Artificial Sequence
  Cyclic GFR-binding peptide
NAISMLYFDNGRVLLLKKYRDAANNVV

SEQ ID NO: 124514 - protein, 27 aa, Artificial Sequence
  Cyclic GFR-binding peptide
SAISILYLDSANNVVLKNYQDAANNVV

SEQ ID NO: 124515 - protein, 27 aa, Artificial Sequence
  Cyclic GFR-binding peptide
SAISILYLIGKTPKILKNYQDAANNVV

SEQ ID NO: 124516 - protein, 27 aa, Artificial Sequence
  Cyclic GFR-binding peptide
NAISILYFDENKNVVLKKYRDAANNVV

SEQ ID NO: 124517 - protein, 27 aa, Artificial Sequence
  Cyclic GFR-binding peptide
SAISILYLDKGVVTYLKNYQDAANNVV

SEQ ID NO: 124518 - protein, 27 aa, Artificial Sequence
  Cyclic GFR-binding peptide
SAISMLYLDEYDKVVLKNYQDAANNVV

SEQ ID NO: 124519 - protein, 27 aa, Artificial Sequence
  Cyclic GFR-binding peptide
NAISILYFDSANNVVLKKYRDAANNVV

SEQ ID NO: 124520 - protein, 27 aa, Artificial Sequence
  Cyclic GFR-binding peptide
SAISVLYLDDSSNVILKNYQDAANNVV

SEQ ID NO: 124521 - protein, 29 aa, Artificial Sequence
  Cyclic GFR-binding peptide
DAANNVVVTAKKLKPKKRVYEIKRVQVPR

SEQ ID NO: 124522 - protein, 29 aa, Artificial Sequence
  Cyclic GFR-binding peptide
DAANNVVVQVEKLKPKKRVYEVKAVKVSR

SEQ ID NO: 124523 - protein, 27 aa, Artificial Sequence
  Cyclic GFR-binding peptide
DAANNVVVTAKKVKPTRGVIKRIQVPR

SEQ ID NO: 124524 - protein, 29 aa, Artificial Sequence
  Cyclic GFR-binding peptide
DAANNVVVQVEKFIPKKRVIEVKAVKVSR

SEQ ID NO: 124525 - protein, 29 aa, Artificial Sequence
  Cyclic GFR-binding peptide
DAANNVVVQVEKHQGQHPKIRVKAMKVSR

SEQ ID NO: 124526 - protein, 29 aa, Artificial Sequence
  Cyclic GFR-binding peptide
DAANNVVVTAKKHQGQHPKIRIKRMQVPR

SEQ ID NO: 124527 - protein, 27 aa, Artificial Sequence
  Cyclic GFR-binding peptide
DAANNVVVTAKKIKPTKGIIKRIQVPR

SEQ ID NO: 124528 - protein, 27 aa, Artificial Sequence
  Cyclic GFR-binding peptide
DAANNVVVQVEKVKPKRGVVKAIKVSR

SEQ ID NO: 124529 - protein, 27 aa, Artificial Sequence
  Cyclic GFR-binding peptide
DAANNVVVTAKKVKPKRGVIKRIQVPR

SEQ ID NO: 124530 - protein, 27 aa, Artificial Sequence
  Cyclic GFR-binding peptide
DAANNVVVQVEKIKPTKGIVKAIKVSR

SEQ ID NO: 124531 - protein, 27 aa, Artificial Sequence
  Cyclic GFR-binding peptide
DAANNVVVQVEKVKPTRGVVKAIKVSR

SEQ ID NO: 124532 - protein, 29 aa, Artificial Sequence
  Cyclic GFR-binding peptide
DAANNVVVTAKKFIPKKRVIEIKRVQVPR

SEQ ID NO: 124533 - protein, 29 aa, Artificial Sequence
  Cyclic GFR-binding peptide
RPVQVRKIEYVRKKPKLKKATVDAANNVV

SEQ ID NO: 124534 - protein, 29 aa, Artificial Sequence
  Cyclic GFR-binding peptide
RSVKVAKVEYVRKKPKLKEVQVDAANNVV

SEQ ID NO: 124535 - protein, 27 aa, Artificial Sequence
  Cyclic GFR-binding peptide
RPVQIRKIVGRTPKVKKATVDAANNVV

SEQ ID NO: 124536 - protein, 29 aa, Artificial Sequence
  Cyclic GFR-binding peptide
RSVKVAKVEIVRKKPIFKEVQVDAANNVV

SEQ ID NO: 124537 - protein, 29 aa, Artificial Sequence
  Cyclic GFR-binding peptide
RSVKMAKVRIKPHQGQHKEVQVDAANNVV

SEQ ID NO: 124538 - protein, 29 aa, Artificial Sequence
  Cyclic GFR-binding peptide
RPVQMRKIRIKPHQGQHKKATVDAANNVV

SEQ ID NO: 124539 - protein, 27 aa, Artificial Sequence
  Cyclic GFR-binding peptide
RPVQIRKIIGKTPKIKKATVDAANNVV

SEQ ID NO: 124540 - protein, 27 aa, Artificial Sequence
  Cyclic GFR-binding peptide
RSVKIAKVVGRKPKVKEVQVDAANNVV

SEQ ID NO: 124541 - protein, 27 aa, Artificial Sequence
  Cyclic GFR-binding peptide
RPVQIRKIVGRKPKVKKATVDAANNVV

SEQ ID NO: 124542 - protein, 27 aa, Artificial Sequence
  Cyclic GFR-binding peptide
RSVKIAKVIGKTPKIKEVQVDAANNVV

SEQ ID NO: 124543 - protein, 27 aa, Artificial Sequence
  Cyclic GFR-binding peptide
RSVKIAKVVGRTPKVKEVQVDAANNVV

SEQ ID NO: 124544 - protein, 29 aa, Artificial Sequence
  Cyclic GFR-binding peptide
RPVQVRKIEIVRKKPIFKKATVDAANNVV

SEQ ID NO: 124545 - protein, 27 aa, Artificial Sequence
  Cyclic GFR-binding peptide
DSANNVVRYKKLIKPTKGIFYLISIAN

SEQ ID NO: 124546 - protein, 29 aa, Artificial Sequence
  Cyclic GFR-binding peptide
DSANNVVRHKRLFIPKKRVIEYYLVSTAS

SEQ ID NO: 124547 - protein, 27 aa, Artificial Sequence
  Cyclic GFR-binding peptide
DSANNVVYHYKLVVKDYEDKYLMSIPS

SEQ ID NO: 124548 - protein, 27 aa, Artificial Sequence
  Cyclic GFR-binding peptide
DSANNVVQYNKLIVNNSSDLYLVSIAS

SEQ ID NO: 124549 - protein, 27 aa, Artificial Sequence
  Cyclic GFR-binding peptide
DSANNVVRYKKLVVKDYEDFYLMSIAN

SEQ ID NO: 124550 - protein, 27 aa, Artificial Sequence
  Cyclic GFR-binding peptide
DSANNVVRYKKLVKPTRGVFYLISIAN

SEQ ID NO: 124551 - protein, 27 aa, Artificial Sequence
  Cyclic GFR-binding peptide
DSANNVVRHKRLVVKENEDYYLMSTAS

SEQ ID NO: 124552 - protein, 27 aa, Artificial Sequence
  Cyclic GFR-binding peptide
DSANNVVYHYKLIKPTKGIKYLISIPS

SEQ ID NO: 124553 - protein, 29 aa, Artificial Sequence
  Cyclic GFR-binding peptide
DSANNVVRYKKLFIPKKRVIEFYLVSIAN

SEQ ID NO: 124554 - protein, 27 aa, Artificial Sequence
  Cyclic GFR-binding peptide
DSANNVVYHYKLVVKENEDKYLMSIPS

SEQ ID NO: 124555 - protein, 27 aa, Artificial Sequence
  Cyclic GFR-binding peptide
DSANNVVRHKRLVKPKRGVYYLISTAS

SEQ ID NO: 124556 - protein, 27 aa, Artificial Sequence
  Cyclic GFR-binding peptide
DSANNVVYHYKLVKPKRGVKYLISIPS

SEQ ID NO: 124557 - protein, 29 aa, Artificial Sequence
  Cyclic GFR-binding peptide
DSANNVVQYNKLFIPKKRVIELYLVSIAS

SEQ ID NO: 124558 - protein, 27 aa, Artificial Sequence
  Cyclic GFR-binding peptide
DSANNVVQYNKLVKPTRGVLYLISIAS

SEQ ID NO: 124559 - protein, 27 aa, Artificial Sequence
  Cyclic GFR-binding peptide
DSANNVVRYKKLVVKENEDFYLMSIAN

SEQ ID NO: 124560 - protein, 27 aa, Artificial Sequence
  Cyclic GFR-binding peptide
DSANNVVQYNKLTPVGMDDLYLVSIAS

SEQ ID NO: 124561 - protein, 27 aa, Artificial Sequence
  Cyclic GFR-binding peptide
DSANNVVRYKKLTPVGMDDFYLVSIAN

SEQ ID NO: 124562 - protein, 27 aa, Artificial Sequence
  Cyclic GFR-binding peptide
DSANNVVRYKKLVKPKRGVFYLISIAN

SEQ ID NO: 124563 - protein, 27 aa, Artificial Sequence
  Cyclic GFR-binding peptide
DSANNVVQYNKLVVKENEDLYLMSIAS

SEQ ID NO: 124564 - protein, 27 aa, Artificial Sequence
  Cyclic GFR-binding peptide
DSANNVVYHYKLIVNSSDDKYLVSIPS

SEQ ID NO: 124565 - protein, 27 aa, Artificial Sequence
  Cyclic GFR-binding peptide
DSANNVVQYNKLVKPKRGVLYLISIAS

SEQ ID NO: 124566 - protein, 27 aa, Artificial Sequence
  Cyclic GFR-binding peptide
DSANNVVRYKKLIVNNSSDFYLVSIAN

SEQ ID NO: 124567 - protein, 27 aa, Artificial Sequence
  Cyclic GFR-binding peptide
DSANNVVRYKKLIVNSSDDFYLVSIAN

SEQ ID NO: 124568 - protein, 27 aa, Artificial Sequence
  Cyclic GFR-binding peptide
DSANNVVRHKRLVKPTRGVYYLISTAS

SEQ ID NO: 124569 - protein, 29 aa, Artificial Sequence
  Cyclic GFR-binding peptide
DSANNVVYHYKLFIPKKRVIEKYLVSIPS

SEQ ID NO: 124570 - protein, 27 aa, Artificial Sequence
  Cyclic GFR-binding peptide
DSANNVVRHKRLIKPTKGIYYLISTAS

SEQ ID NO: 124571 - protein, 27 aa, Artificial Sequence
  Cyclic GFR-binding peptide
DSANNVVRHKRLTPVGMDDYYLVSTAS

SEQ ID NO: 124572 - protein, 27 aa, Artificial Sequence
  Cyclic GFR-binding peptide
DSANNVVYHYKLTPVGMDDKYLVSIPS

SEQ ID NO: 124573 - protein, 27 aa, Artificial Sequence
  Cyclic GFR-binding peptide
DSANNVVYHYKLIVNNSSDKYLVSIPS

SEQ ID NO: 124574 - protein, 27 aa, Artificial Sequence
  Cyclic GFR-binding peptide
DSANNVVRHKRLIVNNSSDYYLVSTAS

SEQ ID NO: 124575 - protein, 27 aa, Artificial Sequence
  Cyclic GFR-binding peptide
DSANNVVYHYKLVKPTRGVKYLISIPS

SEQ ID NO: 124576 - protein, 27 aa, Artificial Sequence
  Cyclic GFR-binding peptide
DSANNVVRHKRLIVNSSDDYYLVSTAS

SEQ ID NO: 124577 - protein, 27 aa, Artificial Sequence
  Cyclic GFR-binding peptide
DSANNVVRHKRLVVKDYEDYYLMSTAS

SEQ ID NO: 124578 - protein, 27 aa, Artificial Sequence
  Cyclic GFR-binding peptide
DSANNVVQYNKLIKPTKGILYLISIAS

SEQ ID NO: 124579 - protein, 27 aa, Artificial Sequence
  Cyclic GFR-binding peptide
DSANNVVQYNKLVVKDYEDLYLMSIAS

SEQ ID NO: 124580 - protein, 27 aa, Artificial Sequence
  Cyclic GFR-binding peptide
DSANNVVQYNKLIVNSSDDLYLVSIAS

SEQ ID NO: 124581 - protein, 27 aa, Artificial Sequence
  Cyclic GFR-binding peptide
NAISILYFIGKTPKILKKYRDSANNVV

SEQ ID NO: 124582 - protein, 29 aa, Artificial Sequence
  Cyclic GFR-binding peptide
SATSVLYYEIVRKKPIFLRKHRDSANNVV

SEQ ID NO: 124583 - protein, 27 aa, Artificial Sequence
  Cyclic GFR-binding peptide
SPISMLYKDEYDKVVLKYHYDSANNVV

SEQ ID NO: 124584 - protein, 27 aa, Artificial Sequence
  Cyclic GFR-binding peptide
SAISVLYLDSSNNVILKNYQDSANNVV

SEQ ID NO: 124585 - protein, 27 aa, Artificial Sequence
  Cyclic GFR-binding peptide
NAISMLYFDEYDKVVLKKYRDSANNVV

SEQ ID NO: 124586 - protein, 27 aa, Artificial Sequence
  Cyclic GFR-binding peptide
NAISILYFVGRTPKVLKKYRDSANNVV

SEQ ID NO: 124587 - protein, 27 aa, Artificial Sequence
  Cyclic GFR-binding peptide
SATSMLYYDENEKVVLRKHRDSANNVV

SEQ ID NO: 124588 - protein, 27 aa, Artificial Sequence
  Cyclic GFR-binding peptide
SPISILYKIGKTPKILKYHYDSANNVV

SEQ ID NO: 124589 - protein, 29 aa, Artificial Sequence
  Cyclic GFR-binding peptide
NAISVLYFEIVRKKPIFLKKYRDSANNVV

SEQ ID NO: 124590 - protein, 27 aa, Artificial Sequence
  Cyclic GFR-binding peptide
SPISMLYKDENEKVVLKYHYDSANNVV

SEQ ID NO: 124591 - protein, 27 aa, Artificial Sequence
  Cyclic GFR-binding peptide
SATSILYYVGRKPKVLRKHRDSANNVV

SEQ ID NO: 124592 - protein, 27 aa, Artificial Sequence
  Cyclic GFR-binding peptide
SPISILYKVGRKPKVLKYHYDSANNVV

SEQ ID NO: 124593 - protein, 29 aa, Artificial Sequence
  Cyclic GFR-binding peptide
SAISVLYLEIVRKKPIFLKNYQDSANNVV

SEQ ID NO: 124594 - protein, 27 aa, Artificial Sequence
  Cyclic GFR-binding peptide
SAISILYLVGRTPKVLKNYQDSANNVV

SEQ ID NO: 124595 - protein, 27 aa, Artificial Sequence
  Cyclic GFR-binding peptide
NAISMLYFDENEKVVLKKYRDSANNVV

SEQ ID NO: 124596 - protein, 27 aa, Artificial Sequence
  Cyclic GFR-binding peptide
SAISVLYLDDMGVPTLKNYQDSANNVV

SEQ ID NO: 124597 - protein, 27 aa, Artificial Sequence
  Cyclic GFR-binding peptide
NAISVLYFDDMGVPTLKKYRDSANNVV

SEQ ID NO: 124598 - protein, 27 aa, Artificial Sequence
  Cyclic GFR-binding peptide
NAISILYFVGRKPKVLKKYRDSANNVV

SEQ ID NO: 124599 - protein, 27 aa, Artificial Sequence
  Cyclic GFR-binding peptide
SAISMLYLDENEKVVLKNYQDSANNVV

SEQ ID NO: 124600 - protein, 27 aa, Artificial Sequence
  Cyclic GFR-binding peptide
SPISVLYKDDSSNVILKYHYDSANNVV

SEQ ID NO: 124601 - protein, 27 aa, Artificial Sequence
  Cyclic GFR-binding peptide
SAISILYLVGRKPKVLKNYQDSANNVV

SEQ ID NO: 124602 - protein, 27 aa, Artificial Sequence
  Cyclic GFR-binding peptide
NAISVLYFDSSNNVILKKYRDSANNVV

SEQ ID NO: 124603 - protein, 27 aa, Artificial Sequence
  Cyclic GFR-binding peptide
NAISVLYFDDSSNVILKKYRDSANNVV

SEQ ID NO: 124604 - protein, 27 aa, Artificial Sequence
  Cyclic GFR-binding peptide
SATSILYYVGRTPKVLRKHRDSANNVV

SEQ ID NO: 124605 - protein, 29 aa, Artificial Sequence
  Cyclic GFR-binding peptide
SPISVLYKEIVRKKPIFLKYHYDSANNVV

SEQ ID NO: 124606 - protein, 27 aa, Artificial Sequence
  Cyclic GFR-binding peptide
SATSILYYIGKTPKILRKHRDSANNVV

SEQ ID NO: 124607 - protein, 27 aa, Artificial Sequence
  Cyclic GFR-binding peptide
SATSVLYYDDMGVPTLRKHRDSANNVV

SEQ ID NO: 124608 - protein, 27 aa, Artificial Sequence
  Cyclic GFR-binding peptide
SPISVLYKDDMGVPTLKYHYDSANNVV

SEQ ID NO: 124609 - protein, 27 aa, Artificial Sequence
  Cyclic GFR-binding peptide
SPISVLYKDSSNNVILKYHYDSANNVV

SEQ ID NO: 124610 - protein, 27 aa, Artificial Sequence
  Cyclic GFR-binding peptide
SATSVLYYDSSNNVILRKHRDSANNVV

SEQ ID NO: 124611 - protein, 27 aa, Artificial Sequence
  Cyclic GFR-binding peptide
SPISILYKVGRTPKVLKYHYDSANNVV

SEQ ID NO: 124612 - protein, 27 aa, Artificial Sequence
  Cyclic GFR-binding peptide
SATSVLYYDDSSNVILRKHRDSANNVV

SEQ ID NO: 124613 - protein, 27 aa, Artificial Sequence
  Cyclic GFR-binding peptide
SATSMLYYDEYDKVVLRKHRDSANNVV

SEQ ID NO: 124614 - protein, 27 aa, Artificial Sequence
  Cyclic GFR-binding peptide
SAISILYLIGKTPKILKNYQDSANNVV

SEQ ID NO: 124615 - protein, 27 aa, Artificial Sequence
  Cyclic GFR-binding peptide
SAISMLYLDEYDKVVLKNYQDSANNVV

SEQ ID NO: 124616 - protein, 27 aa, Artificial Sequence
  Cyclic GFR-binding peptide
SAISVLYLDDSSNVILKNYQDSANNVV

SEQ ID NO: 124617 - protein, 27 aa, Artificial Sequence
  Cyclic GFR-binding peptide
DSANNVVRYKKLIKPTKGIFYLISIAN

SEQ ID NO: 124618 - protein, 27 aa, Artificial Sequence
  Cyclic GFR-binding peptide
DSANNVVNSLQEVVKDYEDYYLMTLPE

SEQ ID NO: 124619 - protein, 27 aa, Artificial Sequence
  Cyclic GFR-binding peptide
DSANNVVNSLQEIKPTKGIYYVIPLPE

SEQ ID NO: 124620 - protein, 27 aa, Artificial Sequence
  Cyclic GFR-binding peptide
DSANNVVNSLQEVKPKRGVYYLITLPE

SEQ ID NO: 124621 - protein, 27 aa, Artificial Sequence
  Cyclic GFR-binding peptide
DSANNVVNSLQEVKPTRGVYYVIPLPE

SEQ ID NO: 124622 - protein, 27 aa, Artificial Sequence
  Cyclic GFR-binding peptide
DSANNVVRYKKLVVKDYEDFYLMSIAN

SEQ ID NO: 124623 - protein, 27 aa, Artificial Sequence
  Cyclic GFR-binding peptide
DSANNVVEYQKYIVNSSDDIFLVSIPS

SEQ ID NO: 124624 - protein, 27 aa, Artificial Sequence
  Cyclic GFR-binding peptide
DSANNVVEYQKYVKPTRGVIFLISIPS

SEQ ID NO: 124625 - protein, 27 aa, Artificial Sequence
  Cyclic GFR-binding peptide
DSANNVVNSLQEVVKENEDYYLMTLPE

SEQ ID NO: 124626 - protein, 27 aa, Artificial Sequence
  Cyclic GFR-binding peptide
DSANNVVRYKKLVKPTRGVFYLISIAN

SEQ ID NO: 124627 - protein, 27 aa, Artificial Sequence
  Cyclic GFR-binding peptide
DSANNVVNSLQEVVNNASDYYLITLPE

SEQ ID NO: 124628 - protein, 27 aa, Artificial Sequence
  Cyclic GFR-binding peptide
DSANNVVNSLQEVKPKRGVYYVIPLPE

SEQ ID NO: 124629 - protein, 27 aa, Artificial Sequence
  Cyclic GFR-binding peptide
DSANNVVNSLQEVVNNASDYYVIPLPE

SEQ ID NO: 124630 - protein, 27 aa, Artificial Sequence
  Cyclic GFR-binding peptide
DSANNVVNSLQEVKPTRGVYYLITLPE

SEQ ID NO: 124631 - protein, 27 aa, Artificial Sequence
  Cyclic GFR-binding peptide
DSANNVVQYNKLVKPTRGVLYLISIAS

SEQ ID NO: 124632 - protein, 27 aa, Artificial Sequence
  Cyclic GFR-binding peptide
DSANNVVRYKKLVVKENEDFYLMSIAN

SEQ ID NO: 124633 - protein, 27 aa, Artificial Sequence
  Cyclic GFR-binding peptide
DSANNVVEYQKYIKPTKGIIFLISIPS

SEQ ID NO: 124634 - protein, 27 aa, Artificial Sequence
  Cyclic GFR-binding peptide
DSANNVVEYQKYVVNNASDIFLISIPS

SEQ ID NO: 124635 - protein, 27 aa, Artificial Sequence
  Cyclic GFR-binding peptide
DSANNVVRYKKLVKPKRGVFYLISIAN

SEQ ID NO: 124636 - protein, 27 aa, Artificial Sequence
  Cyclic GFR-binding peptide
DSANNVVNSLQEIVNSSDDYYVVPLPE

SEQ ID NO: 124637 - protein, 27 aa, Artificial Sequence
  Cyclic GFR-binding peptide
DSANNVVNSLQEVVKDYEDYYVMPLPE

SEQ ID NO: 124638 - protein, 27 aa, Artificial Sequence
  Cyclic GFR-binding peptide
DSANNVVQYNKLVVKENEDLYLMSIAS

SEQ ID NO: 124639 - protein, 27 aa, Artificial Sequence
  Cyclic GFR-binding peptide
DSANNVVEYQKYVVKENEDIFLMSIPS

SEQ ID NO: 124640 - protein, 27 aa, Artificial Sequence
  Cyclic GFR-binding peptide
DSANNVVQYNKLVKPKRGVLYLISIAS

SEQ ID NO: 124641 - protein, 27 aa, Artificial Sequence
  Cyclic GFR-binding peptide
DSANNVVRYKKLIVNSSDDFYLVSIAN

SEQ ID NO: 124642 - protein, 27 aa, Artificial Sequence
  Cyclic GFR-binding peptide
DSANNVVNSLQEVVKENEDYYVMPLPE

SEQ ID NO: 124643 - protein, 27 aa, Artificial Sequence
  Cyclic GFR-binding peptide
DSANNVVEYQKYVVKDYEDIFLMSIPS

SEQ ID NO: 124644 - protein, 27 aa, Artificial Sequence
  Cyclic GFR-binding peptide
DSANNVVQYNKLVVNNASDLYLISIAS

SEQ ID NO: 124645 - protein, 27 aa, Artificial Sequence
  Cyclic GFR-binding peptide
DSANNVVQYNKLIKPTKGILYLISIAS

SEQ ID NO: 124646 - protein, 27 aa, Artificial Sequence
  Cyclic GFR-binding peptide
DSANNVVNSLQEIKPTKGIYYLITLPE

SEQ ID NO: 124647 - protein, 27 aa, Artificial Sequence
  Cyclic GFR-binding peptide
DSANNVVEYQKYVKPKRGVIFLISIPS

SEQ ID NO: 124648 - protein, 27 aa, Artificial Sequence
  Cyclic GFR-binding peptide
DSANNVVQYNKLVVKDYEDLYLMSIAS

SEQ ID NO: 124649 - protein, 27 aa, Artificial Sequence
  Cyclic GFR-binding peptide
DSANNVVRYKKLVVNNASDFYLISIAN

SEQ ID NO: 124650 - protein, 27 aa, Artificial Sequence
  Cyclic GFR-binding peptide
DSANNVVNSLQEIVNSSDDYYLVTLPE

SEQ ID NO: 124651 - protein, 27 aa, Artificial Sequence
  Cyclic GFR-binding peptide
DSANNVVQYNKLIVNSSDDLYLVSIAS

SEQ ID NO: 124652 - protein, 27 aa, Artificial Sequence
  Cyclic GFR-binding peptide
NAISILYFIGKTPKILKKYRDSANNVV

SEQ ID NO: 124653 - protein, 27 aa, Artificial Sequence
  Cyclic GFR-binding peptide
EPLTMLYYDEYDKVVEQLSNDSANNVV

SEQ ID NO: 124654 - protein, 27 aa, Artificial Sequence
  Cyclic GFR-binding peptide
EPLPIVYYIGKTPKIEQLSNDSANNVV

SEQ ID NO: 124655 - protein, 27 aa, Artificial Sequence
  Cyclic GFR-binding peptide
EPLTILYYVGRKPKVEQLSNDSANNVV

SEQ ID NO: 124656 - protein, 27 aa, Artificial Sequence
  Cyclic GFR-binding peptide
EPLPIVYYVGRTPKVEQLSNDSANNVV

SEQ ID NO: 124657 - protein, 27 aa, Artificial Sequence
  Cyclic GFR-binding peptide
NAISMLYFDEYDKVVLKKYRDSANNVV

SEQ ID NO: 124658 - protein, 27 aa, Artificial Sequence
  Cyclic GFR-binding peptide
SPISVLFIDDSSNVIYKQYEDSANNVV

SEQ ID NO: 124659 - protein, 27 aa, Artificial Sequence
  Cyclic GFR-binding peptide
SPISILFIVGRTPKVYKQYEDSANNVV

SEQ ID NO: 124660 - protein, 27 aa, Artificial Sequence
  Cyclic GFR-binding peptide
EPLTMLYYDENEKVVEQLSNDSANNVV

SEQ ID NO: 124661 - protein, 27 aa, Artificial Sequence
  Cyclic GFR-binding peptide
NAISILYFVGRTPKVLKKYRDSANNVV

SEQ ID NO: 124662 - protein, 27 aa, Artificial Sequence
  Cyclic GFR-binding peptide
EPLTILYYDSANNVVEQLSNDSANNVV

SEQ ID NO: 124663 - protein, 27 aa, Artificial Sequence
  Cyclic GFR-binding peptide
EPLPIVYYVGRKPKVEQLSNDSANNVV

SEQ ID NO: 124664 - protein, 27 aa, Artificial Sequence
  Cyclic GFR-binding peptide
EPLPIVYYDSANNVVEQLSNDSANNVV

SEQ ID NO: 124665 - protein, 27 aa, Artificial Sequence
  Cyclic GFR-binding peptide
EPLTILYYVGRTPKVEQLSNDSANNVV

SEQ ID NO: 124666 - protein, 27 aa, Artificial Sequence
  Cyclic GFR-binding peptide
SAISILYLVGRTPKVLKNYQDSANNVV

SEQ ID NO: 124667 - protein, 27 aa, Artificial Sequence
  Cyclic GFR-binding peptide
NAISMLYFDENEKVVLKKYRDSANNVV

SEQ ID NO: 124668 - protein, 27 aa, Artificial Sequence
  Cyclic GFR-binding peptide
SPISILFIIGKTPKIYKQYEDSANNVV

SEQ ID NO: 124669 - protein, 27 aa, Artificial Sequence
  Cyclic GFR-binding peptide
SPISILFIDSANNVVYKQYEDSANNVV

SEQ ID NO: 124670 - protein, 27 aa, Artificial Sequence
  Cyclic GFR-binding peptide
NAISILYFVGRKPKVLKKYRDSANNVV

SEQ ID NO: 124671 - protein, 27 aa, Artificial Sequence
  Cyclic GFR-binding peptide
EPLPVVYYDDSSNVIEQLSNDSANNVV

SEQ ID NO: 124672 - protein, 27 aa, Artificial Sequence
  Cyclic GFR-binding peptide
EPLPMVYYDEYDKVVEQLSNDSANNVV

SEQ ID NO: 124673 - protein, 27 aa, Artificial Sequence
  Cyclic GFR-binding peptide
SAISMLYLDENEKVVLKNYQDSANNVV

SEQ ID NO: 124674 - protein, 27 aa, Artificial Sequence
  Cyclic GFR-binding peptide
SPISMLFIDENEKVVYKQYEDSANNVV

SEQ ID NO: 124675 - protein, 27 aa, Artificial Sequence
  Cyclic GFR-binding peptide
SAISILYLVGRKPKVLKNYQDSANNVV

SEQ ID NO: 124676 - protein, 27 aa, Artificial Sequence
  Cyclic GFR-binding peptide
NAISVLYFDDSSNVILKKYRDSANNVV

SEQ ID NO: 124677 - protein, 27 aa, Artificial Sequence
  Cyclic GFR-binding peptide
EPLPMVYYDENEKVVEQLSNDSANNVV

SEQ ID NO: 124678 - protein, 27 aa, Artificial Sequence
  Cyclic GFR-binding peptide
SPISMLFIDEYDKVVYKQYEDSANNVV

SEQ ID NO: 124679 - protein, 27 aa, Artificial Sequence
  Cyclic GFR-binding peptide
SAISILYLDSANNVVLKNYQDSANNVV

SEQ ID NO: 124680 - protein, 27 aa, Artificial Sequence
  Cyclic GFR-binding peptide
SAISILYLIGKTPKILKNYQDSANNVV

SEQ ID NO: 124681 - protein, 27 aa, Artificial Sequence
  Cyclic GFR-binding peptide
EPLTILYYIGKTPKIEQLSNDSANNVV

SEQ ID NO: 124682 - protein, 27 aa, Artificial Sequence
  Cyclic GFR-binding peptide
SPISILFIVGRKPKVYKQYEDSANNVV

SEQ ID NO: 124683 - protein, 27 aa, Artificial Sequence
  Cyclic GFR-binding peptide
SAISMLYLDEYDKVVLKNYQDSANNVV

SEQ ID NO: 124684 - protein, 27 aa, Artificial Sequence
  Cyclic GFR-binding peptide
NAISILYFDSANNVVLKKYRDSANNVV

SEQ ID NO: 124685 - protein, 27 aa, Artificial Sequence
  Cyclic GFR-binding peptide
EPLTVLYYDDSSNVIEQLSNDSANNVV

SEQ ID NO: 124686 - protein, 27 aa, Artificial Sequence
  Cyclic GFR-binding peptide
SAISVLYLDDSSNVILKNYQDSANNVV

SEQ ID NO: 124687 - protein, 29 aa, Artificial Sequence
  Cyclic GFR-binding peptide
DSANNVVVTAKKLKPKKRVYEIKRVQVPR

SEQ ID NO: 124688 - protein, 29 aa, Artificial Sequence
  Cyclic GFR-binding peptide
DSANNVVVQVEKLKPKKRVYEVKAVKVSR

SEQ ID NO: 124689 - protein, 29 aa, Artificial Sequence
  Cyclic GFR-binding peptide
DSANNVVVQVEKFIPKKRVIEVKAVKVSR

SEQ ID NO: 124690 - protein, 29 aa, Artificial Sequence
  Cyclic GFR-binding peptide
DSANNVVVQVEKHQGQHPKIRVKAMKVSR

SEQ ID NO: 124691 - protein, 29 aa, Artificial Sequence
  Cyclic GFR-binding peptide
DSANNVVVTAKKHQGQHPKIRIKRMQVPR

SEQ ID NO: 124692 - protein, 29 aa, Artificial Sequence
  Cyclic GFR-binding peptide
DSANNVVSMEGLLKPKKRVYEMIQVTINS

SEQ ID NO: 124693 - protein, 29 aa, Artificial Sequence
  Cyclic GFR-binding peptide
DSANNVVSMEGIFIPKKRVIEMIQVTINS

SEQ ID NO: 124694 - protein, 29 aa, Artificial Sequence
  Cyclic GFR-binding peptide
DSANNVVSMEGLHQGQHPKIRMIQMTINS

SEQ ID NO: 124695 - protein, 29 aa, Artificial Sequence
  Cyclic GFR-binding peptide
DSANNVVSMEGILKPKKRVYEMIQVTINS

SEQ ID NO: 124696 - protein, 29 aa, Artificial Sequence
  Cyclic GFR-binding peptide
DSANNVVSMEGLFIPKKRVIEMIQVTINS

SEQ ID NO: 124697 - protein, 29 aa, Artificial Sequence
  Cyclic GFR-binding peptide
DSANNVVVTAKKFIPKKRVIEIKRVQVPR

SEQ ID NO: 124698 - protein, 29 aa, Artificial Sequence
  Cyclic GFR-binding peptide
DSANNVVSMEGIHQGQHPKIRMIQMTINS

SEQ ID NO: 124699 - protein, 29 aa, Artificial Sequence
  Cyclic GFR-binding peptide
RPVQVRKIEYVRKKPKLKKATVDSANNVV

SEQ ID NO: 124700 - protein, 29 aa, Artificial Sequence
  Cyclic GFR-binding peptide
RSVKVAKVEYVRKKPKLKEVQVDSANNVV

SEQ ID NO: 124701 - protein, 29 aa, Artificial Sequence
  Cyclic GFR-binding peptide
RSVKVAKVEIVRKKPIFKEVQVDSANNVV

SEQ ID NO: 124702 - protein, 29 aa, Artificial Sequence
  Cyclic GFR-binding peptide
RSVKMAKVRIKPHQGQHKEVQVDSANNVV

SEQ ID NO: 124703 - protein, 29 aa, Artificial Sequence
  Cyclic GFR-binding peptide
RPVQMRKIRIKPHQGQHKKATVDSANNVV

SEQ ID NO: 124704 - protein, 29 aa, Artificial Sequence
  Cyclic GFR-binding peptide
SNITVQIMEYVRKKPKLLGEMSDSANNVV

SEQ ID NO: 124705 - protein, 29 aa, Artificial Sequence
  Cyclic GFR-binding peptide
SNITVQIMEIVRKKPIFIGEMSDSANNVV

SEQ ID NO: 124706 - protein, 29 aa, Artificial Sequence
  Cyclic GFR-binding peptide
SNITMQIMRIKPHQGQHLGEMSDSANNVV

SEQ ID NO: 124707 - protein, 29 aa, Artificial Sequence
  Cyclic GFR-binding peptide
SNITVQIMEYVRKKPKLIGEMSDSANNVV

SEQ ID NO: 124708 - protein, 29 aa, Artificial Sequence
  Cyclic GFR-binding peptide
SNITVQIMEIVRKKPIFLGEMSDSANNVV

SEQ ID NO: 124709 - protein, 29 aa, Artificial Sequence
  Cyclic GFR-binding peptide
RPVQVRKIEIVRKKPIFKKATVDSANNVV

SEQ ID NO: 124710 - protein, 29 aa, Artificial Sequence
  Cyclic GFR-binding peptide
SNITMQIMRIKPHQGQHIGEMSDSANNVV

SEQ ID NO: 124711 - protein, 29 aa, Artificial Sequence
  Cyclic GFR-binding peptide
DSANNVVVTAKKLKPKKRVYEIKRVQVPR

SEQ ID NO: 124712 - protein, 29 aa, Artificial Sequence
  Cyclic GFR-binding peptide
DSANNVVVQVEKLKPKKRVYEVKAVKVSR

SEQ ID NO: 124713 - protein, 29 aa, Artificial Sequence
  Cyclic GFR-binding peptide
DSANNVVVQVEKFIPKKRVIEVKAVKVSR

SEQ ID NO: 124714 - protein, 29 aa, Artificial Sequence
  Cyclic GFR-binding peptide
DSANNVVVQVEKHQGQHPKIRVKAMKVSR

SEQ ID NO: 124715 - protein, 29 aa, Artificial Sequence
  Cyclic GFR-binding peptide
DSANNVVVTAKKHQGQHPKIRIKRMQVPR

SEQ ID NO: 124716 - protein, 29 aa, Artificial Sequence
  Cyclic GFR-binding peptide
DSANNVVSMEGLLKPKKRVYEMIQVTINS

SEQ ID NO: 124717 - protein, 29 aa, Artificial Sequence
  Cyclic GFR-binding peptide
DSANNVVSMEGIFIPKKRVIEMIQVTINS

SEQ ID NO: 124718 - protein, 29 aa, Artificial Sequence
  Cyclic GFR-binding peptide
DSANNVVSMEGLHQGQHPKIRMIQMTINS

SEQ ID NO: 124719 - protein, 29 aa, Artificial Sequence
  Cyclic GFR-binding peptide
DSANNVVSMEGILKPKKRVYEMIQVTINS

SEQ ID NO: 124720 - protein, 29 aa, Artificial Sequence
  Cyclic GFR-binding peptide
DSANNVVSMEGLFIPKKRVIEMIQVTINS

SEQ ID NO: 124721 - protein, 29 aa, Artificial Sequence
  Cyclic GFR-binding peptide
DSANNVVVTAKKFIPKKRVIEIKRVQVPR

SEQ ID NO: 124722 - protein, 29 aa, Artificial Sequence
  Cyclic GFR-binding peptide
DSANNVVSMEGIHQGQHPKIRMIQMTINS

SEQ ID NO: 124723 - protein, 29 aa, Artificial Sequence
  Cyclic GFR-binding peptide
RPVQVRKIEYVRKKPKLKKATVDSANNVV

SEQ ID NO: 124724 - protein, 29 aa, Artificial Sequence
  Cyclic GFR-binding peptide
RSVKVAKVEYVRKKPKLKEVQVDSANNVV

SEQ ID NO: 124725 - protein, 29 aa, Artificial Sequence
  Cyclic GFR-binding peptide
RSVKVAKVEIVRKKPIFKEVQVDSANNVV

SEQ ID NO: 124726 - protein, 29 aa, Artificial Sequence
  Cyclic GFR-binding peptide
RSVKMAKVRIKPHQGQHKEVQVDSANNVV

SEQ ID NO: 124727 - protein, 29 aa, Artificial Sequence
  Cyclic GFR-binding peptide
RPVQMRKIRIKPHQGQHKKATVDSANNVV

SEQ ID NO: 124728 - protein, 29 aa, Artificial Sequence
  Cyclic GFR-binding peptide
SNITVQIMEYVRKKPKLLGEMSDSANNVV

SEQ ID NO: 124729 - protein, 29 aa, Artificial Sequence
  Cyclic GFR-binding peptide
SNITVQIMEIVRKKPIFIGEMSDSANNVV

SEQ ID NO: 124730 - protein, 29 aa, Artificial Sequence
  Cyclic GFR-binding peptide
SNITMQIMRIKPHQGQHLGEMSDSANNVV

SEQ ID NO: 124731 - protein, 29 aa, Artificial Sequence
  Cyclic GFR-binding peptide
SNITVQIMEYVRKKPKLIGEMSDSANNVV

SEQ ID NO: 124732 - protein, 29 aa, Artificial Sequence
  Cyclic GFR-binding peptide
SNITVQIMEIVRKKPIFLGEMSDSANNVV

SEQ ID NO: 124733 - protein, 29 aa, Artificial Sequence
  Cyclic GFR-binding peptide
RPVQVRKIEIVRKKPIFKKATVDSANNVV

SEQ ID NO: 124734 - protein, 29 aa, Artificial Sequence
  Cyclic GFR-binding peptide
SNITMQIMRIKPHQGQHIGEMSDSANNVV

SEQ ID NO: 124735 - protein, 27 aa, Artificial Sequence
  Cyclic GFR-binding peptide
DSANNVVEYQKYVVKENEDIYLMSIPS

SEQ ID NO: 124736 - protein, 27 aa, Artificial Sequence
  Cyclic GFR-binding peptide
DSANNVVRYKKLIKPTKGIFYLISIAN

SEQ ID NO: 124737 - protein, 27 aa, Artificial Sequence
  Cyclic GFR-binding peptide
DSANNVVEYKFKVKPTRGVLYLISIPE

SEQ ID NO: 124738 - protein, 27 aa, Artificial Sequence
  Cyclic GFR-binding peptide
DSANNVVYHYKLVVKDYEDKYLMSIPS

SEQ ID NO: 124739 - protein, 27 aa, Artificial Sequence
  Cyclic GFR-binding peptide
DSANNVVEYKFKTPVGMDDLYLVSIPE

SEQ ID NO: 124740 - protein, 27 aa, Artificial Sequence
  Cyclic GFR-binding peptide
DSANNVVEYQKYVKPKRGVIYLISIPS

SEQ ID NO: 124741 - protein, 27 aa, Artificial Sequence
  Cyclic GFR-binding peptide
DSANNVVRYKKLVVKDYEDFYLMSIAN

SEQ ID NO: 124742 - protein, 27 aa, Artificial Sequence
  Cyclic GFR-binding peptide
DSANNVVEYQKYVVKDYEDIYLMSIPS

SEQ ID NO: 124743 - protein, 27 aa, Artificial Sequence
  Cyclic GFR-binding peptide
DSANNVVRYKKLVKPTRGVFYLISIAN

SEQ ID NO: 124744 - protein, 27 aa, Artificial Sequence
  Cyclic GFR-binding peptide
DSANNVVYHYKLIKPTKGIKYLISIPS

SEQ ID NO: 124745 - protein, 27 aa, Artificial Sequence
  Cyclic GFR-binding peptide
DSANNVVYHYKLVVKENEDKYLMSIPS

SEQ ID NO: 124746 - protein, 27 aa, Artificial Sequence
  Cyclic GFR-binding peptide
DSANNVVYHYKLVKPKRGVKYLISIPS

SEQ ID NO: 124747 - protein, 27 aa, Artificial Sequence
  Cyclic GFR-binding peptide
DSANNVVEYKFKIKPTKGILYLISIPE

SEQ ID NO: 124748 - protein, 27 aa, Artificial Sequence
  Cyclic GFR-binding peptide
DSANNVVEYQKYIKPTKGIIYLISIPS

SEQ ID NO: 124749 - protein, 27 aa, Artificial Sequence
  Cyclic GFR-binding peptide
DSANNVVRYKKLVVKENEDFYLMSIAN

SEQ ID NO: 124750 - protein, 27 aa, Artificial Sequence
  Cyclic GFR-binding peptide
DSANNVVRYKKLVVNNAADFYLISIAN

SEQ ID NO: 124751 - protein, 27 aa, Artificial Sequence
  Cyclic GFR-binding peptide
DSANNVVYHYKLYTVVGKDKYLISIPS

SEQ ID NO: 124752 - protein, 27 aa, Artificial Sequence
  Cyclic GFR-binding peptide
DSANNVVRYKKLTPVGMDDFYLVSIAN

SEQ ID NO: 124753 - protein, 27 aa, Artificial Sequence
  Cyclic GFR-binding peptide
DSANNVVRYKKLVKPKRGVFYLISIAN

SEQ ID NO: 124754 - protein, 27 aa, Artificial Sequence
  Cyclic GFR-binding peptide
DSANNVVYHYKLVVNNAADKYLISIPS

SEQ ID NO: 124755 - protein, 27 aa, Artificial Sequence
  Cyclic GFR-binding peptide
DSANNVVYHYKLIVNSSDDKYLVSIPS

SEQ ID NO: 124756 - protein, 27 aa, Artificial Sequence
  Cyclic GFR-binding peptide
DSANNVVRYKKLIVNNSSDFYLVSIAN

SEQ ID NO: 124757 - protein, 27 aa, Artificial Sequence
  Cyclic GFR-binding peptide
DSANNVVRYKKLYTVVGKDFYLISIAN

SEQ ID NO: 124758 - protein, 27 aa, Artificial Sequence
  Cyclic GFR-binding peptide
DSANNVVEYQKYVVNNAADIYLISIPS

SEQ ID NO: 124759 - protein, 27 aa, Artificial Sequence
  Cyclic GFR-binding peptide
DSANNVVRYKKLIVNSSDDFYLVSIAN

SEQ ID NO: 124760 - protein, 27 aa, Artificial Sequence
  Cyclic GFR-binding peptide
DSANNVVEYKFKIVNNSSDLYLVSIPE

SEQ ID NO: 124761 - protein, 27 aa, Artificial Sequence
  Cyclic GFR-binding peptide
DSANNVVEYQKYVKPTRGVIYLISIPS

SEQ ID NO: 124762 - protein, 27 aa, Artificial Sequence
  Cyclic GFR-binding peptide
DSANNVVEYQKYIVNSSDDIYLVSIPS

SEQ ID NO: 124763 - protein, 27 aa, Artificial Sequence
  Cyclic GFR-binding peptide
DSANNVVYHYKLTPVGMDDKYLVSIPS

SEQ ID NO: 124764 - protein, 27 aa, Artificial Sequence
  Cyclic GFR-binding peptide
DSANNVVYHYKLIVNNSSDKYLVSIPS

SEQ ID NO: 124765 - protein, 27 aa, Artificial Sequence
  Cyclic GFR-binding peptide
DSANNVVEYKFKIVNSSDDLYLVSIPE

SEQ ID NO: 124766 - protein, 27 aa, Artificial Sequence
  Cyclic GFR-binding peptide
DSANNVVYHYKLVKPTRGVKYLISIPS

SEQ ID NO: 124767 - protein, 27 aa, Artificial Sequence
  Cyclic GFR-binding peptide
DSANNVVEYKFKVKPKRGVLYLISIPE

SEQ ID NO: 124768 - protein, 27 aa, Artificial Sequence
  Cyclic GFR-binding peptide
DSANNVVEYQKYYTVVGKDIYLISIPS

SEQ ID NO: 124769 - protein, 27 aa, Artificial Sequence
  Cyclic GFR-binding peptide
DSANNVVEYKFKVVKENEDLYLMSIPE

SEQ ID NO: 124770 - protein, 27 aa, Artificial Sequence
  Cyclic GFR-binding peptide
DSANNVVEYQKYTPVGMDDIYLVSIPS

SEQ ID NO: 124771 - protein, 27 aa, Artificial Sequence
  Cyclic GFR-binding peptide
DSANNVVEYQKYIVNNSSDIYLVSIPS

SEQ ID NO: 124772 - protein, 27 aa, Artificial Sequence
  Cyclic GFR-binding peptide
DSANNVVEYKFKVVKDYEDLYLMSIPE

SEQ ID NO: 124773 - protein, 27 aa, Artificial Sequence
  Cyclic GFR-binding peptide
DSANNVVEYKFKYTVVGKDLYLISIPE

SEQ ID NO: 124774 - protein, 27 aa, Artificial Sequence
  Cyclic GFR-binding peptide
DSANNVVEYKFKVVNNAADLYLISIPE

SEQ ID NO: 124775 - protein, 27 aa, Artificial Sequence
  Cyclic GFR-binding peptide
SPISMLYIDENEKVVYKQYEDSANNVV

SEQ ID NO: 124776 - protein, 27 aa, Artificial Sequence
  Cyclic GFR-binding peptide
NAISILYFIGKTPKILKKYRDSANNVV

SEQ ID NO: 124777 - protein, 27 aa, Artificial Sequence
  Cyclic GFR-binding peptide
EPISILYLVGRTPKVKFKYEDSANNVV

SEQ ID NO: 124778 - protein, 27 aa, Artificial Sequence
  Cyclic GFR-binding peptide
SPISMLYKDEYDKVVLKYHYDSANNVV

SEQ ID NO: 124779 - protein, 27 aa, Artificial Sequence
  Cyclic GFR-binding peptide
EPISVLYLDDMGVPTKFKYEDSANNVV

SEQ ID NO: 124780 - protein, 27 aa, Artificial Sequence
  Cyclic GFR-binding peptide
SPISILYIVGRKPKVYKQYEDSANNVV

SEQ ID NO: 124781 - protein, 27 aa, Artificial Sequence
  Cyclic GFR-binding peptide
NAISMLYFDEYDKVVLKKYRDSANNVV

SEQ ID NO: 124782 - protein, 27 aa, Artificial Sequence
  Cyclic GFR-binding peptide
SPISMLYIDEYDKVVYKQYEDSANNVV

SEQ ID NO: 124783 - protein, 27 aa, Artificial Sequence
  Cyclic GFR-binding peptide
NAISILYFVGRTPKVLKKYRDSANNVV

SEQ ID NO: 124784 - protein, 27 aa, Artificial Sequence
  Cyclic GFR-binding peptide
SPISILYKIGKTPKILKYHYDSANNVV

SEQ ID NO: 124785 - protein, 27 aa, Artificial Sequence
  Cyclic GFR-binding peptide
SPISMLYKDENEKVVLKYHYDSANNVV

SEQ ID NO: 124786 - protein, 27 aa, Artificial Sequence
  Cyclic GFR-binding peptide
SPISILYKVGRKPKVLKYHYDSANNVV

SEQ ID NO: 124787 - protein, 27 aa, Artificial Sequence
  Cyclic GFR-binding peptide
EPISILYLIGKTPKIKFKYEDSANNVV

SEQ ID NO: 124788 - protein, 27 aa, Artificial Sequence
  Cyclic GFR-binding peptide
SPISILYIIGKTPKIYKQYEDSANNVV

SEQ ID NO: 124789 - protein, 27 aa, Artificial Sequence
  Cyclic GFR-binding peptide
NAISMLYFDENEKVVLKKYRDSANNVV

SEQ ID NO: 124790 - protein, 27 aa, Artificial Sequence
  Cyclic GFR-binding peptide
NAISILYFDAANNVVLKKYRDSANNVV

SEQ ID NO: 124791 - protein, 27 aa, Artificial Sequence
  Cyclic GFR-binding peptide
SPISILYKDKGVVTYLKYHYDSANNVV

SEQ ID NO: 124792 - protein, 27 aa, Artificial Sequence
  Cyclic GFR-binding peptide
NAISVLYFDDMGVPTLKKYRDSANNVV

SEQ ID NO: 124793 - protein, 27 aa, Artificial Sequence
  Cyclic GFR-binding peptide
NAISILYFVGRKPKVLKKYRDSANNVV

SEQ ID NO: 124794 - protein, 27 aa, Artificial Sequence
  Cyclic GFR-binding peptide
SPISILYKDAANNVVLKYHYDSANNVV

SEQ ID NO: 124795 - protein, 27 aa, Artificial Sequence
  Cyclic GFR-binding peptide
SPISVLYKDDSSNVILKYHYDSANNVV

SEQ ID NO: 124796 - protein, 27 aa, Artificial Sequence
  Cyclic GFR-binding peptide
NAISVLYFDSSNNVILKKYRDSANNVV

SEQ ID NO: 124797 - protein, 27 aa, Artificial Sequence
  Cyclic GFR-binding peptide
NAISILYFDKGVVTYLKKYRDSANNVV

SEQ ID NO: 124798 - protein, 27 aa, Artificial Sequence
  Cyclic GFR-binding peptide
SPISILYIDAANNVVYKQYEDSANNVV

SEQ ID NO: 124799 - protein, 27 aa, Artificial Sequence
  Cyclic GFR-binding peptide
NAISVLYFDDSSNVILKKYRDSANNVV

SEQ ID NO: 124800 - protein, 27 aa, Artificial Sequence
  Cyclic GFR-binding peptide
EPISVLYLDSSNNVIKFKYEDSANNVV

SEQ ID NO: 124801 - protein, 27 aa, Artificial Sequence
  Cyclic GFR-binding peptide
SPISILYIVGRTPKVYKQYEDSANNVV

SEQ ID NO: 124802 - protein, 27 aa, Artificial Sequence
  Cyclic GFR-binding peptide
SPISVLYIDDSSNVIYKQYEDSANNVV

SEQ ID NO: 124803 - protein, 27 aa, Artificial Sequence
  Cyclic GFR-binding peptide
SPISVLYKDDMGVPTLKYHYDSANNVV

SEQ ID NO: 124804 - protein, 27 aa, Artificial Sequence
  Cyclic GFR-binding peptide
SPISVLYKDSSNNVILKYHYDSANNVV

SEQ ID NO: 124805 - protein, 27 aa, Artificial Sequence
  Cyclic GFR-binding peptide
EPISVLYLDDSSNVIKFKYEDSANNVV

SEQ ID NO: 124806 - protein, 27 aa, Artificial Sequence
  Cyclic GFR-binding peptide
SPISILYKVGRTPKVLKYHYDSANNVV

SEQ ID NO: 124807 - protein, 27 aa, Artificial Sequence
  Cyclic GFR-binding peptide
EPISILYLVGRKPKVKFKYEDSANNVV

SEQ ID NO: 124808 - protein, 27 aa, Artificial Sequence
  Cyclic GFR-binding peptide
SPISILYIDKGVVTYYKQYEDSANNVV

SEQ ID NO: 124809 - protein, 27 aa, Artificial Sequence
  Cyclic GFR-binding peptide
EPISMLYLDENEKVVKFKYEDSANNVV

SEQ ID NO: 124810 - protein, 27 aa, Artificial Sequence
  Cyclic GFR-binding peptide
SPISVLYIDDMGVPTYKQYEDSANNVV

SEQ ID NO: 124811 - protein, 27 aa, Artificial Sequence
  Cyclic GFR-binding peptide
SPISVLYIDSSNNVIYKQYEDSANNVV

SEQ ID NO: 124812 - protein, 27 aa, Artificial Sequence
  Cyclic GFR-binding peptide
EPISMLYLDEYDKVVKFKYEDSANNVV

SEQ ID NO: 124813 - protein, 27 aa, Artificial Sequence
  Cyclic GFR-binding peptide
EPISILYLDKGVVTYKFKYEDSANNVV

SEQ ID NO: 124814 - protein, 27 aa, Artificial Sequence
  Cyclic GFR-binding peptide
EPISILYLDAANNVVKFKYEDSANNVV

SEQ ID NO: 124815 - protein, 27 aa, Artificial Sequence
  Cyclic GFR-binding peptide
DSANNVVPIKGYIIQQKDNFYLMNIPS

SEQ ID NO: 124816 - protein, 27 aa, Artificial Sequence
  Cyclic GFR-binding peptide
DSANNVVPIKGYVVKDYEDFYLMNIPS

SEQ ID NO: 124817 - protein, 27 aa, Artificial Sequence
  Cyclic GFR-binding peptide
DSANNVVPIKGYIVNSSDDFYLVNIPS

SEQ ID NO: 124818 - protein, 27 aa, Artificial Sequence
  Cyclic GFR-binding peptide
DSANNVVPIKGYLLVRGNDFYLMNIPS

SEQ ID NO: 124819 - protein, 27 aa, Artificial Sequence
  Cyclic GFR-binding peptide
DSANNVVPIKGYVVNNAADFYLINIPS

SEQ ID NO: 124820 - protein, 27 aa, Artificial Sequence
  Cyclic GFR-binding peptide
DSANNVVPIKGYVVKENEDFYLMNIPS

SEQ ID NO: 124821 - protein, 27 aa, Artificial Sequence
  Cyclic GFR-binding peptide
DSANNVVPIKGYVVNNASDFYLINIPS

SEQ ID NO: 124822 - protein, 27 aa, Artificial Sequence
  Cyclic GFR-binding peptide
DSANNVVPIKGYYTVVGKDFYLINIPS

SEQ ID NO: 124823 - protein, 27 aa, Artificial Sequence
  Cyclic GFR-binding peptide
DSANNVVPIKGYTPVGMDDFYLVNIPS

SEQ ID NO: 124824 - protein, 27 aa, Artificial Sequence
  Cyclic GFR-binding peptide
DSANNVVPIKGYIVNNSSDFYLVNIPS

SEQ ID NO: 124825 - protein, 27 aa, Artificial Sequence
  Cyclic GFR-binding peptide
SPINMLYFNDKQQIIYGKIPDSANNVV

SEQ ID NO: 124826 - protein, 27 aa, Artificial Sequence
  Cyclic GFR-binding peptide
SPINMLYFDEYDKVVYGKIPDSANNVV

SEQ ID NO: 124827 - protein, 27 aa, Artificial Sequence
  Cyclic GFR-binding peptide
SPINVLYFDDSSNVIYGKIPDSANNVV

SEQ ID NO: 124828 - protein, 27 aa, Artificial Sequence
  Cyclic GFR-binding peptide
SPINMLYFDNGRVLLYGKIPDSANNVV

SEQ ID NO: 124829 - protein, 27 aa, Artificial Sequence
  Cyclic GFR-binding peptide
SPINILYFDAANNVVYGKIPDSANNVV

SEQ ID NO: 124830 - protein, 27 aa, Artificial Sequence
  Cyclic GFR-binding peptide
SPINMLYFDENEKVVYGKIPDSANNVV

SEQ ID NO: 124831 - protein, 27 aa, Artificial Sequence
  Cyclic GFR-binding peptide
SPINILYFDSANNVVYGKIPDSANNVV

SEQ ID NO: 124832 - protein, 27 aa, Artificial Sequence
  Cyclic GFR-binding peptide
SPINILYFDKGVVTYYGKIPDSANNVV

SEQ ID NO: 124833 - protein, 27 aa, Artificial Sequence
  Cyclic GFR-binding peptide
SPINVLYFDDMGVPTYGKIPDSANNVV

SEQ ID NO: 124834 - protein, 27 aa, Artificial Sequence
  Cyclic GFR-binding peptide
SPINVLYFDSSNNVIYGKIPDSANNVV

SEQ ID NO: 124835 - protein, 27 aa, Artificial Sequence
  Cyclic GFR-binding peptide
DSANNVVPIKGYIIQQKDNFYLMNIPS

SEQ ID NO: 124836 - protein, 27 aa, Artificial Sequence
  Cyclic GFR-binding peptide
DSANNVVPIKGYVVKDYEDFYLMNIPS

SEQ ID NO: 124837 - protein, 27 aa, Artificial Sequence
  Cyclic GFR-binding peptide
DSANNVVPIKGYIVNSSDDFYLVNIPS

SEQ ID NO: 124838 - protein, 27 aa, Artificial Sequence
  Cyclic GFR-binding peptide
DSANNVVPIKGYLLVRGNDFYLMNIPS

SEQ ID NO: 124839 - protein, 27 aa, Artificial Sequence
  Cyclic GFR-binding peptide
DSANNVVPIKGYVVNNAADFYLINIPS

SEQ ID NO: 124840 - protein, 27 aa, Artificial Sequence
  Cyclic GFR-binding peptide
DSANNVVPIKGYVVKENEDFYLMNIPS

SEQ ID NO: 124841 - protein, 27 aa, Artificial Sequence
  Cyclic GFR-binding peptide
DSANNVVPIKGYVVNNASDFYLINIPS

SEQ ID NO: 124842 - protein, 27 aa, Artificial Sequence
  Cyclic GFR-binding peptide
DSANNVVPIKGYYTVVGKDFYLINIPS

SEQ ID NO: 124843 - protein, 27 aa, Artificial Sequence
  Cyclic GFR-binding peptide
DSANNVVPIKGYTPVGMDDFYLVNIPS

SEQ ID NO: 124844 - protein, 27 aa, Artificial Sequence
  Cyclic GFR-binding peptide
DSANNVVPIKGYIVNNSSDFYLVNIPS

SEQ ID NO: 124845 - protein, 27 aa, Artificial Sequence
  Cyclic GFR-binding peptide
SPINMLYFNDKQQIIYGKIPDSANNVV

SEQ ID NO: 124846 - protein, 27 aa, Artificial Sequence
  Cyclic GFR-binding peptide
SPINMLYFDEYDKVVYGKIPDSANNVV

SEQ ID NO: 124847 - protein, 27 aa, Artificial Sequence
  Cyclic GFR-binding peptide
SPINVLYFDDSSNVIYGKIPDSANNVV

SEQ ID NO: 124848 - protein, 27 aa, Artificial Sequence
  Cyclic GFR-binding peptide
SPINMLYFDNGRVLLYGKIPDSANNVV

SEQ ID NO: 124849 - protein, 27 aa, Artificial Sequence
  Cyclic GFR-binding peptide
SPINILYFDAANNVVYGKIPDSANNVV

SEQ ID NO: 124850 - protein, 27 aa, Artificial Sequence
  Cyclic GFR-binding peptide
SPINMLYFDENEKVVYGKIPDSANNVV

SEQ ID NO: 124851 - protein, 27 aa, Artificial Sequence
  Cyclic GFR-binding peptide
SPINILYFDSANNVVYGKIPDSANNVV

SEQ ID NO: 124852 - protein, 27 aa, Artificial Sequence
  Cyclic GFR-binding peptide
SPINILYFDKGVVTYYGKIPDSANNVV

SEQ ID NO: 124853 - protein, 27 aa, Artificial Sequence
  Cyclic GFR-binding peptide
SPINVLYFDDMGVPTYGKIPDSANNVV

SEQ ID NO: 124854 - protein, 27 aa, Artificial Sequence
  Cyclic GFR-binding peptide
SPINVLYFDSSNNVIYGKIPDSANNVV

SEQ ID NO: 124855 - protein, 27 aa, Artificial Sequence
  Cyclic GFR-binding peptide
DSANNVVRYKKLIKPTKGIFYLISIAN

SEQ ID NO: 124856 - protein, 27 aa, Artificial Sequence
  Cyclic GFR-binding peptide
DSANNVVRYKKLVVKDYEDFYLMSIAN

SEQ ID NO: 124857 - protein, 27 aa, Artificial Sequence
  Cyclic GFR-binding peptide
DSANNVVRYKKLVKPTRGVFYLISIAN

SEQ ID NO: 124858 - protein, 27 aa, Artificial Sequence
  Cyclic GFR-binding peptide
DSANNVVRYKKLVVKENEDFYLMSIAN

SEQ ID NO: 124859 - protein, 27 aa, Artificial Sequence
  Cyclic GFR-binding peptide
DSANNVVRYKKLVKPKRGVFYLISIAN

SEQ ID NO: 124860 - protein, 27 aa, Artificial Sequence
  Cyclic GFR-binding peptide
DSANNVVRYKKLIVNSSDDFYLVSIAN

SEQ ID NO: 124861 - protein, 27 aa, Artificial Sequence
  Cyclic GFR-binding peptide
DSANNVVRYKKLVVNNASDFYLISIAN

SEQ ID NO: 124862 - protein, 27 aa, Artificial Sequence
  Cyclic GFR-binding peptide
NAISILYFIGKTPKILKKYRDSANNVV

SEQ ID NO: 124863 - protein, 27 aa, Artificial Sequence
  Cyclic GFR-binding peptide
NAISMLYFDEYDKVVLKKYRDSANNVV

SEQ ID NO: 124864 - protein, 27 aa, Artificial Sequence
  Cyclic GFR-binding peptide
NAISILYFVGRTPKVLKKYRDSANNVV

SEQ ID NO: 124865 - protein, 27 aa, Artificial Sequence
  Cyclic GFR-binding peptide
NAISMLYFDENEKVVLKKYRDSANNVV

SEQ ID NO: 124866 - protein, 27 aa, Artificial Sequence
  Cyclic GFR-binding peptide
NAISILYFVGRKPKVLKKYRDSANNVV

SEQ ID NO: 124867 - protein, 27 aa, Artificial Sequence
  Cyclic GFR-binding peptide
NAISVLYFDDSSNVILKKYRDSANNVV

SEQ ID NO: 124868 - protein, 27 aa, Artificial Sequence
  Cyclic GFR-binding peptide
NAISILYFDSANNVVLKKYRDSANNVV

SEQ ID NO: 124869 - protein, 27 aa, Artificial Sequence
  Cyclic GFR-binding peptide
DSANNVVEYQKYVVKENEDIYLMSIPS

SEQ ID NO: 124870 - protein, 27 aa, Artificial Sequence
  Cyclic GFR-binding peptide
DSANNVVNSLQEVVKDYEDYYLMTLPE

SEQ ID NO: 124871 - protein, 27 aa, Artificial Sequence
  Cyclic GFR-binding peptide
DSANNVVEYQKYVVKENEDIFLMSIPS

SEQ ID NO: 124872 - protein, 27 aa, Artificial Sequence
  Cyclic GFR-binding peptide
DSANNVVNSLQEIKPTKGIYYVIPLPE

SEQ ID NO: 124873 - protein, 27 aa, Artificial Sequence
  Cyclic GFR-binding peptide
DSANNVVNSLQEVKPKRGVYYLITLPE

SEQ ID NO: 124874 - protein, 27 aa, Artificial Sequence
  Cyclic GFR-binding peptide
DSANNVVEYQKYVVNNAADIYLISIPS

SEQ ID NO: 124875 - protein, 27 aa, Artificial Sequence
  Cyclic GFR-binding peptide
DSANNVVNSLQEVKPTRGVYYVIPLPE

SEQ ID NO: 124876 - protein, 27 aa, Artificial Sequence
  Cyclic GFR-binding peptide
DSANNVVEYQKYIVNSSDDIFLVSIPS

SEQ ID NO: 124877 - protein, 27 aa, Artificial Sequence
  Cyclic GFR-binding peptide
DSANNVVEYQKYVKPTRGVIFLISIPS

SEQ ID NO: 124878 - protein, 27 aa, Artificial Sequence
  Cyclic GFR-binding peptide
DSANNVVEYQKYVVKDYEDIYLMSIPS

SEQ ID NO: 124879 - protein, 27 aa, Artificial Sequence
  Cyclic GFR-binding peptide
DSANNVVNSLQEVVKENEDYYLMTLPE

SEQ ID NO: 124880 - protein, 27 aa, Artificial Sequence
  Cyclic GFR-binding peptide
DSANNVVNSLQEVVNNASDYYLITLPE

SEQ ID NO: 124881 - protein, 27 aa, Artificial Sequence
  Cyclic GFR-binding peptide
DSANNVVNSLQEVKPKRGVYYVIPLPE

SEQ ID NO: 124882 - protein, 27 aa, Artificial Sequence
  Cyclic GFR-binding peptide
DSANNVVEYQKYIVNSSDDIYLVSIPS

SEQ ID NO: 124883 - protein, 27 aa, Artificial Sequence
  Cyclic GFR-binding peptide
DSANNVVNSLQEVVKENEDYYVMPLPE

SEQ ID NO: 124884 - protein, 27 aa, Artificial Sequence
  Cyclic GFR-binding peptide
DSANNVVEYQKYVVKDYEDIFLMSIPS

SEQ ID NO: 124885 - protein, 27 aa, Artificial Sequence
  Cyclic GFR-binding peptide
DSANNVVNSLQEVVNNASDYYVIPLPE

SEQ ID NO: 124886 - protein, 27 aa, Artificial Sequence
  Cyclic GFR-binding peptide
DSANNVVEYQKYVVNNASDIYLISIPS

SEQ ID NO: 124887 - protein, 27 aa, Artificial Sequence
  Cyclic GFR-binding peptide
DSANNVVNSLQEVKPTRGVYYLITLPE

SEQ ID NO: 124888 - protein, 27 aa, Artificial Sequence
  Cyclic GFR-binding peptide
DSANNVVEYQKYYTVVGKDIYLISIPS

SEQ ID NO: 124889 - protein, 27 aa, Artificial Sequence
  Cyclic GFR-binding peptide
DSANNVVEYQKYIIQQKDNIYLMSIPS

SEQ ID NO: 124890 - protein, 27 aa, Artificial Sequence
  Cyclic GFR-binding peptide
DSANNVVEYQKYTPVGMDDIYLVSIPS

SEQ ID NO: 124891 - protein, 27 aa, Artificial Sequence
  Cyclic GFR-binding peptide
DSANNVVEYQKYIKPTKGIIFLISIPS

SEQ ID NO: 124892 - protein, 27 aa, Artificial Sequence
  Cyclic GFR-binding peptide
DSANNVVEYQKYIVNNSSDIYLVSIPS

SEQ ID NO: 124893 - protein, 27 aa, Artificial Sequence
  Cyclic GFR-binding peptide
DSANNVVNSLQEIKPTKGIYYLITLPE

SEQ ID NO: 124894 - protein, 27 aa, Artificial Sequence
  Cyclic GFR-binding peptide
DSANNVVEYQKYVVNNASDIFLISIPS

SEQ ID NO: 124895 - protein, 27 aa, Artificial Sequence
  Cyclic GFR-binding peptide
DSANNVVEYQKYVKPKRGVIFLISIPS

SEQ ID NO: 124896 - protein, 27 aa, Artificial Sequence
  Cyclic GFR-binding peptide
DSANNVVNSLQEIVNSSDDYYVVPLPE

SEQ ID NO: 124897 - protein, 27 aa, Artificial Sequence
  Cyclic GFR-binding peptide
DSANNVVNSLQEVVKDYEDYYVMPLPE

SEQ ID NO: 124898 - protein, 27 aa, Artificial Sequence
  Cyclic GFR-binding peptide
DSANNVVEYQKYLLVRGNDIYLMSIPS

SEQ ID NO: 124899 - protein, 27 aa, Artificial Sequence
  Cyclic GFR-binding peptide
DSANNVVNSLQEIVNSSDDYYLVTLPE

SEQ ID NO: 124900 - protein, 27 aa, Artificial Sequence
  Cyclic GFR-binding peptide
SPISMLYIDENEKVVYKQYEDSANNVV

SEQ ID NO: 124901 - protein, 27 aa, Artificial Sequence
  Cyclic GFR-binding peptide
EPLTMLYYDEYDKVVEQLSNDSANNVV

SEQ ID NO: 124902 - protein, 27 aa, Artificial Sequence
  Cyclic GFR-binding peptide
SPISMLFIDENEKVVYKQYEDSANNVV

SEQ ID NO: 124903 - protein, 27 aa, Artificial Sequence
  Cyclic GFR-binding peptide
EPLPIVYYIGKTPKIEQLSNDSANNVV

SEQ ID NO: 124904 - protein, 27 aa, Artificial Sequence
  Cyclic GFR-binding peptide
EPLTILYYVGRKPKVEQLSNDSANNVV

SEQ ID NO: 124905 - protein, 27 aa, Artificial Sequence
  Cyclic GFR-binding peptide
SPISILYIDAANNVVYKQYEDSANNVV

SEQ ID NO: 124906 - protein, 27 aa, Artificial Sequence
  Cyclic GFR-binding peptide
EPLPIVYYVGRTPKVEQLSNDSANNVV

SEQ ID NO: 124907 - protein, 27 aa, Artificial Sequence
  Cyclic GFR-binding peptide
SPISVLFIDDSSNVIYKQYEDSANNVV

SEQ ID NO: 124908 - protein, 27 aa, Artificial Sequence
  Cyclic GFR-binding peptide
SPISILFIVGRTPKVYKQYEDSANNVV

SEQ ID NO: 124909 - protein, 27 aa, Artificial Sequence
  Cyclic GFR-binding peptide
SPISMLYIDEYDKVVYKQYEDSANNVV

SEQ ID NO: 124910 - protein, 27 aa, Artificial Sequence
  Cyclic GFR-binding peptide
EPLTMLYYDENEKVVEQLSNDSANNVV

SEQ ID NO: 124911 - protein, 27 aa, Artificial Sequence
  Cyclic GFR-binding peptide
EPLTILYYDSANNVVEQLSNDSANNVV

SEQ ID NO: 124912 - protein, 27 aa, Artificial Sequence
  Cyclic GFR-binding peptide
EPLPIVYYVGRKPKVEQLSNDSANNVV

SEQ ID NO: 124913 - protein, 27 aa, Artificial Sequence
  Cyclic GFR-binding peptide
SPISVLYIDDSSNVIYKQYEDSANNVV

SEQ ID NO: 124914 - protein, 27 aa, Artificial Sequence
  Cyclic GFR-binding peptide
EPLPMVYYDENEKVVEQLSNDSANNVV

SEQ ID NO: 124915 - protein, 27 aa, Artificial Sequence
  Cyclic GFR-binding peptide
SPISMLFIDEYDKVVYKQYEDSANNVV

SEQ ID NO: 124916 - protein, 27 aa, Artificial Sequence
  Cyclic GFR-binding peptide
EPLPIVYYDSANNVVEQLSNDSANNVV

SEQ ID NO: 124917 - protein, 27 aa, Artificial Sequence
  Cyclic GFR-binding peptide
SPISILYIDSANNVVYKQYEDSANNVV

SEQ ID NO: 124918 - protein, 27 aa, Artificial Sequence
  Cyclic GFR-binding peptide
EPLTILYYVGRTPKVEQLSNDSANNVV

SEQ ID NO: 124919 - protein, 27 aa, Artificial Sequence
  Cyclic GFR-binding peptide
SPISILYIDKGVVTYYKQYEDSANNVV

SEQ ID NO: 124920 - protein, 27 aa, Artificial Sequence
  Cyclic GFR-binding peptide
SPISMLYINDKQQIIYKQYEDSANNVV

SEQ ID NO: 124921 - protein, 27 aa, Artificial Sequence
  Cyclic GFR-binding peptide
SPISVLYIDDMGVPTYKQYEDSANNVV

SEQ ID NO: 124922 - protein, 27 aa, Artificial Sequence
  Cyclic GFR-binding peptide
SPISILFIIGKTPKIYKQYEDSANNVV

SEQ ID NO: 124923 - protein, 27 aa, Artificial Sequence
  Cyclic GFR-binding peptide
SPISVLYIDSSNNVIYKQYEDSANNVV

SEQ ID NO: 124924 - protein, 27 aa, Artificial Sequence
  Cyclic GFR-binding peptide
EPLTILYYIGKTPKIEQLSNDSANNVV

SEQ ID NO: 124925 - protein, 27 aa, Artificial Sequence
  Cyclic GFR-binding peptide
SPISILFIDSANNVVYKQYEDSANNVV

SEQ ID NO: 124926 - protein, 27 aa, Artificial Sequence
  Cyclic GFR-binding peptide
SPISILFIVGRKPKVYKQYEDSANNVV

SEQ ID NO: 124927 - protein, 27 aa, Artificial Sequence
  Cyclic GFR-binding peptide
EPLPVVYYDDSSNVIEQLSNDSANNVV

SEQ ID NO: 124928 - protein, 27 aa, Artificial Sequence
  Cyclic GFR-binding peptide
EPLPMVYYDEYDKVVEQLSNDSANNVV

SEQ ID NO: 124929 - protein, 27 aa, Artificial Sequence
  Cyclic GFR-binding peptide
SPISMLYIDNGRVLLYKQYEDSANNVV

SEQ ID NO: 124930 - protein, 27 aa, Artificial Sequence
  Cyclic GFR-binding peptide
EPLTVLYYDDSSNVIEQLSNDSANNVV

SEQ ID NO: 124931 - protein, 27 aa, Artificial Sequence
  Cyclic GFR-binding peptide
DSANNVVPYVKLVVKENEDFFLMSLSS

SEQ ID NO: 124932 - protein, 29 aa, Artificial Sequence
  Cyclic GFR-binding peptide
DSANNVVPYVKLHQGQHPKIRFFLMSLSS

SEQ ID NO: 124933 - protein, 27 aa, Artificial Sequence
  Cyclic GFR-binding peptide
DSANNVVPYVKLVVNKNEDFFLISLSS

SEQ ID NO: 124934 - protein, 27 aa, Artificial Sequence
  Cyclic GFR-binding peptide
DSANNVVPYVKLVKPKRGVLFFISLSS

SEQ ID NO: 124935 - protein, 27 aa, Artificial Sequence
  Cyclic GFR-binding peptide
DSANNVVPYVKLVVNNAADFFLISLSS

SEQ ID NO: 124936 - protein, 27 aa, Artificial Sequence
  Cyclic GFR-binding peptide
DSANNVVPYVKLIVNNSSDFFLVSLSS

SEQ ID NO: 124937 - protein, 27 aa, Artificial Sequence
  Cyclic GFR-binding peptide
DSANNVVPYVKLIIQQKDNFFLMSLSS

SEQ ID NO: 124938 - protein, 27 aa, Artificial Sequence
  Cyclic GFR-binding peptide
DSANNVVPYVKLLLVRGNDFFLMSLSS

SEQ ID NO: 124939 - protein, 27 aa, Artificial Sequence
  Cyclic GFR-binding peptide
DSANNVVPYVKLVKPTRGVLFFISLSS

SEQ ID NO: 124940 - protein, 27 aa, Artificial Sequence
  Cyclic GFR-binding peptide
DSANNVVPYVKLVVNNASDFFLISLSS

SEQ ID NO: 124941 - protein, 27 aa, Artificial Sequence
  Cyclic GFR-binding peptide
DSANNVVPYVKLIKPTKGILFFISLSS

SEQ ID NO: 124942 - protein, 27 aa, Artificial Sequence
  Cyclic GFR-binding peptide
DSANNVVPYVKLTPVGMDDFFLVSLSS

SEQ ID NO: 124943 - protein, 27 aa, Artificial Sequence
  Cyclic GFR-binding peptide
DSANNVVPYVKLYTVVGKDFFLISLSS

SEQ ID NO: 124944 - protein, 27 aa, Artificial Sequence
  Cyclic GFR-binding peptide
DSANNVVPYVKLVVKDYEDFFLMSLSS

SEQ ID NO: 124945 - protein, 27 aa, Artificial Sequence
  Cyclic GFR-binding peptide
DSANNVVPYVKLIVNSSDDFFLVSLSS

SEQ ID NO: 124946 - protein, 29 aa, Artificial Sequence
  Cyclic GFR-binding peptide
DSANNVVPYVKLLKPKKRVYEFFLVSLSS

SEQ ID NO: 124947 - protein, 27 aa, Artificial Sequence
  Cyclic GFR-binding peptide
SSLSMLFFDENEKVVLKVYPDSANNVV

SEQ ID NO: 124948 - protein, 29 aa, Artificial Sequence
  Cyclic GFR-binding peptide
SSLSMLFFRIKPHQGQHLKVYPDSANNVV

SEQ ID NO: 124949 - protein, 27 aa, Artificial Sequence
  Cyclic GFR-binding peptide
SSLSILFFDENKNVVLKVYPDSANNVV

SEQ ID NO: 124950 - protein, 27 aa, Artificial Sequence
  Cyclic GFR-binding peptide
SSLSILFFVGRKPKVLKVYPDSANNVV

SEQ ID NO: 124951 - protein, 27 aa, Artificial Sequence
  Cyclic GFR-binding peptide
SSLSILFFDAANNVVLKVYPDSANNVV

SEQ ID NO: 124952 - protein, 27 aa, Artificial Sequence
  Cyclic GFR-binding peptide
SSLSVLFFDSSNNVILKVYPDSANNVV

SEQ ID NO: 124953 - protein, 27 aa, Artificial Sequence
  Cyclic GFR-binding peptide
SSLSMLFFNDKQQIILKVYPDSANNVV

SEQ ID NO: 124954 - protein, 27 aa, Artificial Sequence
  Cyclic GFR-binding peptide
SSLSMLFFDNGRVLLLKVYPDSANNVV

SEQ ID NO: 124955 - protein, 27 aa, Artificial Sequence
  Cyclic GFR-binding peptide
SSLSILFFVGRTPKVLKVYPDSANNVV

SEQ ID NO: 124956 - protein, 27 aa, Artificial Sequence
  Cyclic GFR-binding peptide
SSLSILFFDSANNVVLKVYPDSANNVV

SEQ ID NO: 124957 - protein, 27 aa, Artificial Sequence
  Cyclic GFR-binding peptide
SSLSILFFIGKTPKILKVYPDSANNVV

SEQ ID NO: 124958 - protein, 27 aa, Artificial Sequence
  Cyclic GFR-binding peptide
SSLSVLFFDDMGVPTLKVYPDSANNVV

SEQ ID NO: 124959 - protein, 27 aa, Artificial Sequence
  Cyclic GFR-binding peptide
SSLSILFFDKGVVTYLKVYPDSANNVV

SEQ ID NO: 124960 - protein, 27 aa, Artificial Sequence
  Cyclic GFR-binding peptide
SSLSMLFFDEYDKVVLKVYPDSANNVV

SEQ ID NO: 124961 - protein, 27 aa, Artificial Sequence
  Cyclic GFR-binding peptide
SSLSVLFFDDSSNVILKVYPDSANNVV

SEQ ID NO: 124962 - protein, 29 aa, Artificial Sequence
  Cyclic GFR-binding peptide
SSLSVLFFEYVRKKPKLLKVYPDSANNVV

SEQ ID NO: 124963 - protein, 27 aa, Artificial Sequence
  Cyclic GFR-binding peptide
DSANNVVNSLQEVVKDYEDYYLMTLPE

SEQ ID NO: 124964 - protein, 27 aa, Artificial Sequence
  Cyclic GFR-binding peptide
DSANNVVNSLQEIKPTKGIYYVIPLPE

SEQ ID NO: 124965 - protein, 27 aa, Artificial Sequence
  Cyclic GFR-binding peptide
DSANNVVSMEGIIVNSSDDMIQVTINS

SEQ ID NO: 124966 - protein, 27 aa, Artificial Sequence
  Cyclic GFR-binding peptide
DSANNVVNSLQEVKPKRGVYYLITLPE

SEQ ID NO: 124967 - protein, 27 aa, Artificial Sequence
  Cyclic GFR-binding peptide
DSANNVVNSLQEVKPTRGVYYVIPLPE

SEQ ID NO: 124968 - protein, 27 aa, Artificial Sequence
  Cyclic GFR-binding peptide
DSANNVVVTAKKVVKENEDIKRMQVPR

SEQ ID NO: 124969 - protein, 27 aa, Artificial Sequence
  Cyclic GFR-binding peptide
DSANNVVNSLQEIVNSSDDYYVVPLPE

SEQ ID NO: 124970 - protein, 29 aa, Artificial Sequence
  Cyclic GFR-binding peptide
DSANNVVSMEGIHQGQHPKIRMIQMTINS

SEQ ID NO: 124971 - protein, 29 aa, Artificial Sequence
  Cyclic GFR-binding peptide
DSANNVVVTAKKLKPKKRVYEIKRVQVPR

SEQ ID NO: 124972 - protein, 27 aa, Artificial Sequence
  Cyclic GFR-binding peptide
DSANNVVSMEGIVVKDYEDMIQMTINS

SEQ ID NO: 124973 - protein, 29 aa, Artificial Sequence
  Cyclic GFR-binding peptide
DSANNVVVQVEKHQGQHPKIRVKAMKVSR

SEQ ID NO: 124974 - protein, 27 aa, Artificial Sequence
  Cyclic GFR-binding peptide
DSANNVVVTAKKIKPTKGIIKRIQVPR

SEQ ID NO: 124975 - protein, 27 aa, Artificial Sequence
  Cyclic GFR-binding peptide
DSANNVVSMEGIVKPTRGVMIQITINS

SEQ ID NO: 124976 - protein, 29 aa, Artificial Sequence
  Cyclic GFR-binding peptide
DSANNVVNSLQEFIPKKRVIEYYVVPLPE

SEQ ID NO: 124977 - protein, 27 aa, Artificial Sequence
  Cyclic GFR-binding peptide
DSANNVVVQVEKVKPKRGVVKAIKVSR

SEQ ID NO: 124978 - protein, 27 aa, Artificial Sequence
  Cyclic GFR-binding peptide
DSANNVVVQVEKVVKENEDVKAMKVSR

SEQ ID NO: 124979 - protein, 27 aa, Artificial Sequence
  Cyclic GFR-binding peptide
DSANNVVNSLQEVVKENEDYYVMPLPE

SEQ ID NO: 124980 - protein, 27 aa, Artificial Sequence
  Cyclic GFR-binding peptide
DSANNVVVTAKKIVNSSDDIKRVQVPR

SEQ ID NO: 124981 - protein, 27 aa, Artificial Sequence
  Cyclic GFR-binding peptide
DSANNVVVQVEKIKPTKGIVKAIKVSR

SEQ ID NO: 124982 - protein, 27 aa, Artificial Sequence
  Cyclic GFR-binding peptide
DSANNVVNSLQEIKPTKGIYYLITLPE

SEQ ID NO: 124983 - protein, 29 aa, Artificial Sequence
  Cyclic GFR-binding peptide
DSANNVVNSLQEFIPKKRVIEYYLVTLPE

SEQ ID NO: 124984 - protein, 27 aa, Artificial Sequence
  Cyclic GFR-binding peptide
DSANNVVVQVEKIVNSSDDVKAVKVSR

SEQ ID NO: 124985 - protein, 27 aa, Artificial Sequence
  Cyclic GFR-binding peptide
DSANNVVNSLQEIVNSSDDYYLVTLPE

SEQ ID NO: 124986 - protein, 29 aa, Artificial Sequence
  Cyclic GFR-binding peptide
DSANNVVVQVEKLKPKKRVYEVKAVKVSR

SEQ ID NO: 124987 - protein, 29 aa, Artificial Sequence
  Cyclic GFR-binding peptide
DSANNVVVQVEKFIPKKRVIEVKAVKVSR

SEQ ID NO: 124988 - protein, 29 aa, Artificial Sequence
  Cyclic GFR-binding peptide
DSANNVVVTAKKHQGQHPKIRIKRMQVPR

SEQ ID NO: 124989 - protein, 27 aa, Artificial Sequence
  Cyclic GFR-binding peptide
DSANNVVNSLQEVVKENEDYYLMTLPE

SEQ ID NO: 124990 - protein, 29 aa, Artificial Sequence
  Cyclic GFR-binding peptide
DSANNVVSMEGIFIPKKRVIEMIQVTINS

SEQ ID NO: 124991 - protein, 27 aa, Artificial Sequence
  Cyclic GFR-binding peptide
DSANNVVNSLQEVKPKRGVYYVIPLPE

SEQ ID NO: 124992 - protein, 27 aa, Artificial Sequence
  Cyclic GFR-binding peptide
DSANNVVVTAKKVKPKRGVIKRIQVPR

SEQ ID NO: 124993 - protein, 27 aa, Artificial Sequence
  Cyclic GFR-binding peptide
DSANNVVNSLQEVKPTRGVYYLITLPE

SEQ ID NO: 124994 - protein, 27 aa, Artificial Sequence
  Cyclic GFR-binding peptide
DSANNVVVQVEKVKPTRGVVKAIKVSR

SEQ ID NO: 124995 - protein, 29 aa, Artificial Sequence
  Cyclic GFR-binding peptide
DSANNVVSMEGILKPKKRVYEMIQVTINS

SEQ ID NO: 124996 - protein, 27 aa, Artificial Sequence
  Cyclic GFR-binding peptide
DSANNVVNSLQEVVKDYEDYYVMPLPE

SEQ ID NO: 124997 - protein, 27 aa, Artificial Sequence
  Cyclic GFR-binding peptide
DSANNVVVTAKKVKPTRGVIKRIQVPR

SEQ ID NO: 124998 - protein, 29 aa, Artificial Sequence
  Cyclic GFR-binding peptide
DSANNVVNSLQELKPKKRVYEYYLVTLPE

SEQ ID NO: 124999 - protein, 27 aa, Artificial Sequence
  Cyclic GFR-binding peptide
DSANNVVSMEGIVKPKRGVMIQITINS

SEQ ID NO: 125000 - protein, 27 aa, Artificial Sequence
  Cyclic GFR-binding peptide
DSANNVVSMEGIVVKENEDMIQMTINS

SEQ ID NO: 125001 - protein, 27 aa, Artificial Sequence
  Cyclic GFR-binding peptide
DSANNVVSMEGIIKPTKGIMIQITINS

SEQ ID NO: 125002 - protein, 29 aa, Artificial Sequence
  Cyclic GFR-binding peptide
DSANNVVNSLQEHQGQHPKIRYYLMTLPE

SEQ ID NO: 125003 - protein, 27 aa, Artificial Sequence
  Cyclic GFR-binding peptide
DSANNVVVTAKKVVKDYEDIKRMQVPR

SEQ ID NO: 125004 - protein, 29 aa, Artificial Sequence
  Cyclic GFR-binding peptide
DSANNVVNSLQEHQGQHPKIRYYVMPLPE

SEQ ID NO: 125005 - protein, 29 aa, Artificial Sequence
  Cyclic GFR-binding peptide
DSANNVVNSLQELKPKKRVYEYYVVPLPE

SEQ ID NO: 125006 - protein, 29 aa, Artificial Sequence
  Cyclic GFR-binding peptide
DSANNVVVTAKKFIPKKRVIEIKRVQVPR

SEQ ID NO: 125007 - protein, 27 aa, Artificial Sequence
  Cyclic GFR-binding peptide
DSANNVVVQVEKVVKDYEDVKAMKVSR

SEQ ID NO: 125008 - protein, 27 aa, Artificial Sequence
  Cyclic GFR-binding peptide
EPLTMLYYDEYDKVVEQLSNDSANNVV

SEQ ID NO: 125009 - protein, 27 aa, Artificial Sequence
  Cyclic GFR-binding peptide
EPLPIVYYIGKTPKIEQLSNDSANNVV

SEQ ID NO: 125010 - protein, 27 aa, Artificial Sequence
  Cyclic GFR-binding peptide
SNITVQIMDDSSNVIIGEMSDSANNVV

SEQ ID NO: 125011 - protein, 27 aa, Artificial Sequence
  Cyclic GFR-binding peptide
EPLTILYYVGRKPKVEQLSNDSANNVV

SEQ ID NO: 125012 - protein, 27 aa, Artificial Sequence
  Cyclic GFR-binding peptide
EPLPIVYYVGRTPKVEQLSNDSANNVV

SEQ ID NO: 125013 - protein, 27 aa, Artificial Sequence
  Cyclic GFR-binding peptide
RPVQMRKIDENEKVVKKATVDSANNVV

SEQ ID NO: 125014 - protein, 27 aa, Artificial Sequence
  Cyclic GFR-binding peptide
EPLPVVYYDDSSNVIEQLSNDSANNVV

SEQ ID NO: 125015 - protein, 29 aa, Artificial Sequence
  Cyclic GFR-binding peptide
SNITMQIMRIKPHQGQHIGEMSDSANNVV

SEQ ID NO: 125016 - protein, 29 aa, Artificial Sequence
  Cyclic GFR-binding peptide
RPVQVRKIEYVRKKPKLKKATVDSANNVV

SEQ ID NO: 125017 - protein, 27 aa, Artificial Sequence
  Cyclic GFR-binding peptide
SNITMQIMDEYDKVVIGEMSDSANNVV

SEQ ID NO: 125018 - protein, 29 aa, Artificial Sequence
  Cyclic GFR-binding peptide
RSVKMAKVRIKPHQGQHKEVQVDSANNVV

SEQ ID NO: 125019 - protein, 27 aa, Artificial Sequence
  Cyclic GFR-binding peptide
RPVQIRKIIGKTPKIKKATVDSANNVV

SEQ ID NO: 125020 - protein, 27 aa, Artificial Sequence
  Cyclic GFR-binding peptide
SNITIQIMVGRTPKVIGEMSDSANNVV

SEQ ID NO: 125021 - protein, 29 aa, Artificial Sequence
  Cyclic GFR-binding peptide
EPLPVVYYEIVRKKPIFEQLSNDSANNVV

SEQ ID NO: 125022 - protein, 27 aa, Artificial Sequence
  Cyclic GFR-binding peptide
RSVKIAKVVGRKPKVKEVQVDSANNVV

SEQ ID NO: 125023 - protein, 27 aa, Artificial Sequence
  Cyclic GFR-binding peptide
RSVKMAKVDENEKVVKEVQVDSANNVV

SEQ ID NO: 125024 - protein, 27 aa, Artificial Sequence
  Cyclic GFR-binding peptide
EPLPMVYYDENEKVVEQLSNDSANNVV

SEQ ID NO: 125025 - protein, 27 aa, Artificial Sequence
  Cyclic GFR-binding peptide
RPVQVRKIDDSSNVIKKATVDSANNVV

SEQ ID NO: 125026 - protein, 27 aa, Artificial Sequence
  Cyclic GFR-binding peptide
RSVKIAKVIGKTPKIKEVQVDSANNVV

SEQ ID NO: 125027 - protein, 27 aa, Artificial Sequence
  Cyclic GFR-binding peptide
EPLTILYYIGKTPKIEQLSNDSANNVV

SEQ ID NO: 125028 - protein, 29 aa, Artificial Sequence
  Cyclic GFR-binding peptide
EPLTVLYYEIVRKKPIFEQLSNDSANNVV

SEQ ID NO: 125029 - protein, 27 aa, Artificial Sequence
  Cyclic GFR-binding peptide
RSVKVAKVDDSSNVIKEVQVDSANNVV

SEQ ID NO: 125030 - protein, 27 aa, Artificial Sequence
  Cyclic GFR-binding peptide
EPLTVLYYDDSSNVIEQLSNDSANNVV

SEQ ID NO: 125031 - protein, 29 aa, Artificial Sequence
  Cyclic GFR-binding peptide
RSVKVAKVEYVRKKPKLKEVQVDSANNVV

SEQ ID NO: 125032 - protein, 29 aa, Artificial Sequence
  Cyclic GFR-binding peptide
RSVKVAKVEIVRKKPIFKEVQVDSANNVV

SEQ ID NO: 125033 - protein, 29 aa, Artificial Sequence
  Cyclic GFR-binding peptide
RPVQMRKIRIKPHQGQHKKATVDSANNVV

SEQ ID NO: 125034 - protein, 27 aa, Artificial Sequence
  Cyclic GFR-binding peptide
EPLTMLYYDENEKVVEQLSNDSANNVV

SEQ ID NO: 125035 - protein, 29 aa, Artificial Sequence
  Cyclic GFR-binding peptide
SNITVQIMEIVRKKPIFIGEMSDSANNVV

SEQ ID NO: 125036 - protein, 27 aa, Artificial Sequence
  Cyclic GFR-binding peptide
EPLPIVYYVGRKPKVEQLSNDSANNVV

SEQ ID NO: 125037 - protein, 27 aa, Artificial Sequence
  Cyclic GFR-binding peptide
RPVQIRKIVGRKPKVKKATVDSANNVV

SEQ ID NO: 125038 - protein, 27 aa, Artificial Sequence
  Cyclic GFR-binding peptide
EPLTILYYVGRTPKVEQLSNDSANNVV

SEQ ID NO: 125039 - protein, 27 aa, Artificial Sequence
  Cyclic GFR-binding peptide
RSVKIAKVVGRTPKVKEVQVDSANNVV

SEQ ID NO: 125040 - protein, 29 aa, Artificial Sequence
  Cyclic GFR-binding peptide
SNITVQIMEYVRKKPKLIGEMSDSANNVV

SEQ ID NO: 125041 - protein, 27 aa, Artificial Sequence
  Cyclic GFR-binding peptide
EPLPMVYYDEYDKVVEQLSNDSANNVV

SEQ ID NO: 125042 - protein, 27 aa, Artificial Sequence
  Cyclic GFR-binding peptide
RPVQIRKIVGRTPKVKKATVDSANNVV

SEQ ID NO: 125043 - protein, 29 aa, Artificial Sequence
  Cyclic GFR-binding peptide
EPLTVLYYEYVRKKPKLEQLSNDSANNVV

SEQ ID NO: 125044 - protein, 27 aa, Artificial Sequence
  Cyclic GFR-binding peptide
SNITIQIMVGRKPKVIGEMSDSANNVV

SEQ ID NO: 125045 - protein, 27 aa, Artificial Sequence
  Cyclic GFR-binding peptide
SNITMQIMDENEKVVIGEMSDSANNVV

SEQ ID NO: 125046 - protein, 27 aa, Artificial Sequence
  Cyclic GFR-binding peptide
SNITIQIMIGKTPKIIGEMSDSANNVV

SEQ ID NO: 125047 - protein, 29 aa, Artificial Sequence
  Cyclic GFR-binding peptide
EPLTMLYYRIKPHQGQHEQLSNDSANNVV

SEQ ID NO: 125048 - protein, 27 aa, Artificial Sequence
  Cyclic GFR-binding peptide
RPVQMRKIDEYDKVVKKATVDSANNVV

SEQ ID NO: 125049 - protein, 29 aa, Artificial Sequence
  Cyclic GFR-binding peptide
EPLPMVYYRIKPHQGQHEQLSNDSANNVV

SEQ ID NO: 125050 - protein, 29 aa, Artificial Sequence
  Cyclic GFR-binding peptide
EPLPVVYYEYVRKKPKLEQLSNDSANNVV

SEQ ID NO: 125051 - protein, 29 aa, Artificial Sequence
  Cyclic GFR-binding peptide
RPVQVRKIEIVRKKPIFKKATVDSANNVV

SEQ ID NO: 125052 - protein, 27 aa, Artificial Sequence
  Cyclic GFR-binding peptide
RSVKMAKVDEYDKVVKEVQVDSANNVV

SEQ ID NO: 125053 - protein, 27 aa, Artificial Sequence
  Cyclic GFR-binding peptide
DSANNVVRYKKLIIQQKDNFYLMSIAN

SEQ ID NO: 125054 - protein, 27 aa, Artificial Sequence
  Cyclic GFR-binding peptide
DSANNVVRYKKLIVNNSSDFYLVSIAN

SEQ ID NO: 125055 - protein, 27 aa, Artificial Sequence
  Cyclic GFR-binding peptide
DSANNVVRYKKLYTVVGKDFYLISIAN

SEQ ID NO: 125056 - protein, 27 aa, Artificial Sequence
  Cyclic GFR-binding peptide
DSANNVVRYKKLIVNSSDDFYLVSIAN

SEQ ID NO: 125057 - protein, 27 aa, Artificial Sequence
  Cyclic GFR-binding peptide
DSANNVVRYKKLVVKDYEDFYLMSIAN

SEQ ID NO: 125058 - protein, 27 aa, Artificial Sequence
  Cyclic GFR-binding peptide
DSANNVVRYKKLLLVRGNDFYLMSIAN

SEQ ID NO: 125059 - protein, 27 aa, Artificial Sequence
  Cyclic GFR-binding peptide
DSANNVVRYKKLVVKENEDFYLMSIAN

SEQ ID NO: 125060 - protein, 27 aa, Artificial Sequence
  Cyclic GFR-binding peptide
DSANNVVRYKKLVVNNAADFYLISIAN

SEQ ID NO: 125061 - protein, 27 aa, Artificial Sequence
  Cyclic GFR-binding peptide
DSANNVVRYKKLTPVGMDDFYLVSIAN

SEQ ID NO: 125062 - protein, 27 aa, Artificial Sequence
  Cyclic GFR-binding peptide
DSANNVVRYKKLVVNNASDFYLISIAN

SEQ ID NO: 125063 - protein, 27 aa, Artificial Sequence
  Cyclic GFR-binding peptide
NAISMLYFNDKQQIILKKYRDSANNVV

SEQ ID NO: 125064 - protein, 27 aa, Artificial Sequence
  Cyclic GFR-binding peptide
NAISVLYFDSSNNVILKKYRDSANNVV

SEQ ID NO: 125065 - protein, 27 aa, Artificial Sequence
  Cyclic GFR-binding peptide
NAISILYFDKGVVTYLKKYRDSANNVV

SEQ ID NO: 125066 - protein, 27 aa, Artificial Sequence
  Cyclic GFR-binding peptide
NAISVLYFDDSSNVILKKYRDSANNVV

SEQ ID NO: 125067 - protein, 27 aa, Artificial Sequence
  Cyclic GFR-binding peptide
NAISMLYFDEYDKVVLKKYRDSANNVV

SEQ ID NO: 125068 - protein, 27 aa, Artificial Sequence
  Cyclic GFR-binding peptide
NAISMLYFDNGRVLLLKKYRDSANNVV

SEQ ID NO: 125069 - protein, 27 aa, Artificial Sequence
  Cyclic GFR-binding peptide
NAISMLYFDENEKVVLKKYRDSANNVV

SEQ ID NO: 125070 - protein, 27 aa, Artificial Sequence
  Cyclic GFR-binding peptide
NAISILYFDAANNVVLKKYRDSANNVV

SEQ ID NO: 125071 - protein, 27 aa, Artificial Sequence
  Cyclic GFR-binding peptide
NAISVLYFDDMGVPTLKKYRDSANNVV

SEQ ID NO: 125072 - protein, 27 aa, Artificial Sequence
  Cyclic GFR-binding peptide
NAISILYFDSANNVVLKKYRDSANNVV

SEQ ID NO: 125073 - protein, 27 aa, Artificial Sequence
  Cyclic GFR-binding peptide
DSANNVVEYKFKVKPTRGVLYLISIPE

SEQ ID NO: 125074 - protein, 27 aa, Artificial Sequence
  Cyclic GFR-binding peptide
DSANNVVYHYKLVVKDYEDKYLMSIPS

SEQ ID NO: 125075 - protein, 27 aa, Artificial Sequence
  Cyclic GFR-binding peptide
DSANNVVEYKFKTPVGMDDLYLVSIPE

SEQ ID NO: 125076 - protein, 27 aa, Artificial Sequence
  Cyclic GFR-binding peptide
DSANNVVRYKKLVVKDYEDFYLMSIAN

SEQ ID NO: 125077 - protein, 27 aa, Artificial Sequence
  Cyclic GFR-binding peptide
DSANNVVRHKRLVKPKRGVYYLISTAS

SEQ ID NO: 125078 - protein, 27 aa, Artificial Sequence
  Cyclic GFR-binding peptide
DSANNVVYHYKLVKPKRGVKYLISIPS

SEQ ID NO: 125079 - protein, 27 aa, Artificial Sequence
  Cyclic GFR-binding peptide
DSANNVVEYKFKIKPTKGILYLISIPE

SEQ ID NO: 125080 - protein, 27 aa, Artificial Sequence
  Cyclic GFR-binding peptide
DSANNVVEYKFKVVNKNEDLYLISIPE

SEQ ID NO: 125081 - protein, 27 aa, Artificial Sequence
  Cyclic GFR-binding peptide
DSANNVVPIKGYVKPTRGVFYLINIPS

SEQ ID NO: 125082 - protein, 27 aa, Artificial Sequence
  Cyclic GFR-binding peptide
DSANNVVPIKGYVVKENEDFYLMNIPS

SEQ ID NO: 125083 - protein, 27 aa, Artificial Sequence
  Cyclic GFR-binding peptide
DSANNVVYHYKLYTVVGKDKYLISIPS

SEQ ID NO: 125084 - protein, 27 aa, Artificial Sequence
  Cyclic GFR-binding peptide
DSANNVVEYKFKLLVRGNDLYLMSIPE

SEQ ID NO: 125085 - protein, 27 aa, Artificial Sequence
  Cyclic GFR-binding peptide
DSANNVVRYKKLVKPKRGVFYLISIAN

SEQ ID NO: 125086 - protein, 27 aa, Artificial Sequence
  Cyclic GFR-binding peptide
DSANNVVPIKGYTPVGMDDFYLVNIPS

SEQ ID NO: 125087 - protein, 27 aa, Artificial Sequence
  Cyclic GFR-binding peptide
DSANNVVYHYKLVVNKNEDKYLISIPS

SEQ ID NO: 125088 - protein, 27 aa, Artificial Sequence
  Cyclic GFR-binding peptide
DSANNVVYHYKLIVNSSDDKYLVSIPS

SEQ ID NO: 125089 - protein, 27 aa, Artificial Sequence
  Cyclic GFR-binding peptide
DSANNVVPIKGYIVNSSDDFYLVNIPS

SEQ ID NO: 125090 - protein, 27 aa, Artificial Sequence
  Cyclic GFR-binding peptide
DSANNVVRYKKLYTVVGKDFYLISIAN

SEQ ID NO: 125091 - protein, 27 aa, Artificial Sequence
  Cyclic GFR-binding peptide
DSANNVVRHKRLLLVRGNDYYLMSTAS

SEQ ID NO: 125092 - protein, 27 aa, Artificial Sequence
  Cyclic GFR-binding peptide
DSANNVVYHYKLLLVRGNDKYLMSIPS

SEQ ID NO: 125093 - protein, 27 aa, Artificial Sequence
  Cyclic GFR-binding peptide
DSANNVVRYKKLIVNSSDDFYLVSIAN

SEQ ID NO: 125094 - protein, 27 aa, Artificial Sequence
  Cyclic GFR-binding peptide
DSANNVVRHKRLVVNKNEDYYLISTAS

SEQ ID NO: 125095 - protein, 27 aa, Artificial Sequence
  Cyclic GFR-binding peptide
DSANNVVRHKRLIKPTKGIYYLISTAS

SEQ ID NO: 125096 - protein, 27 aa, Artificial Sequence
  Cyclic GFR-binding peptide
DSANNVVPIKGYYTVVGKDFYLINIPS

SEQ ID NO: 125097 - protein, 27 aa, Artificial Sequence
  Cyclic GFR-binding peptide
DSANNVVYHYKLTPVGMDDKYLVSIPS

SEQ ID NO: 125098 - protein, 27 aa, Artificial Sequence
  Cyclic GFR-binding peptide
DSANNVVRHKRLIVNNSSDYYLVSTAS

SEQ ID NO: 125099 - protein, 27 aa, Artificial Sequence
  Cyclic GFR-binding peptide
DSANNVVRYKKLLLVRGNDFYLMSIAN

SEQ ID NO: 125100 - protein, 27 aa, Artificial Sequence
  Cyclic GFR-binding peptide
DSANNVVYHYKLVKPTRGVKYLISIPS

SEQ ID NO: 125101 - protein, 27 aa, Artificial Sequence
  Cyclic GFR-binding peptide
DSANNVVRHKRLIVNSSDDYYLVSTAS

SEQ ID NO: 125102 - protein, 27 aa, Artificial Sequence
  Cyclic GFR-binding peptide
DSANNVVPIKGYLLVRGNDFYLMNIPS

SEQ ID NO: 125103 - protein, 27 aa, Artificial Sequence
  Cyclic GFR-binding peptide
DSANNVVRYKKLVVNKNEDFYLISIAN

SEQ ID NO: 125104 - protein, 27 aa, Artificial Sequence
  Cyclic GFR-binding peptide
DSANNVVEYKFKVVKDYEDLYLMSIPE

SEQ ID NO: 125105 - protein, 27 aa, Artificial Sequence
  Cyclic GFR-binding peptide
DSANNVVPIKGYVVNKNEDFYLINIPS

SEQ ID NO: 125106 - protein, 27 aa, Artificial Sequence
  Cyclic GFR-binding peptide
DSANNVVPIKGYIKPTKGIFYLINIPS

SEQ ID NO: 125107 - protein, 27 aa, Artificial Sequence
  Cyclic GFR-binding peptide
DSANNVVEYKFKVVNNAADLYLISIPE

SEQ ID NO: 125108 - protein, 27 aa, Artificial Sequence
  Cyclic GFR-binding peptide
DSANNVVRHKRLYTVVGKDYYLISTAS

SEQ ID NO: 125109 - protein, 27 aa, Artificial Sequence
  Cyclic GFR-binding peptide
DSANNVVRYKKLIKPTKGIFYLISIAN

SEQ ID NO: 125110 - protein, 27 aa, Artificial Sequence
  Cyclic GFR-binding peptide
DSANNVVPIKGYVVKDYEDFYLMNIPS

SEQ ID NO: 125111 - protein, 27 aa, Artificial Sequence
  Cyclic GFR-binding peptide
DSANNVVEYKFKVVNNASDLYLISIPE

SEQ ID NO: 125112 - protein, 27 aa, Artificial Sequence
  Cyclic GFR-binding peptide
DSANNVVRYKKLVKPTRGVFYLISIAN

SEQ ID NO: 125113 - protein, 27 aa, Artificial Sequence
  Cyclic GFR-binding peptide
DSANNVVRHKRLVVKENEDYYLMSTAS

SEQ ID NO: 125114 - protein, 27 aa, Artificial Sequence
  Cyclic GFR-binding peptide
DSANNVVYHYKLIKPTKGIKYLISIPS

SEQ ID NO: 125115 - protein, 27 aa, Artificial Sequence
  Cyclic GFR-binding peptide
DSANNVVYHYKLVVKENEDKYLMSIPS

SEQ ID NO: 125116 - protein, 27 aa, Artificial Sequence
  Cyclic GFR-binding peptide
DSANNVVRHKRLIIQQKDNYYLMSTAS

SEQ ID NO: 125117 - protein, 27 aa, Artificial Sequence
  Cyclic GFR-binding peptide
DSANNVVRYKKLVVKENEDFYLMSIAN

SEQ ID NO: 125118 - protein, 27 aa, Artificial Sequence
  Cyclic GFR-binding peptide
DSANNVVRYKKLVVNNAADFYLISIAN

SEQ ID NO: 125119 - protein, 27 aa, Artificial Sequence
  Cyclic GFR-binding peptide
DSANNVVEYKFKIIQQKDNLYLMSIPE

SEQ ID NO: 125120 - protein, 27 aa, Artificial Sequence
  Cyclic GFR-binding peptide
DSANNVVRYKKLTPVGMDDFYLVSIAN

SEQ ID NO: 125121 - protein, 27 aa, Artificial Sequence
  Cyclic GFR-binding peptide
DSANNVVYHYKLVVNNAADKYLISIPS

SEQ ID NO: 125122 - protein, 27 aa, Artificial Sequence
  Cyclic GFR-binding peptide
DSANNVVPIKGYIVNNSSDFYLVNIPS

SEQ ID NO: 125123 - protein, 27 aa, Artificial Sequence
  Cyclic GFR-binding peptide
DSANNVVPIKGYVKPKRGVFYLINIPS

SEQ ID NO: 125124 - protein, 27 aa, Artificial Sequence
  Cyclic GFR-binding peptide
DSANNVVRYKKLIIQQKDNFYLMSIAN

SEQ ID NO: 125125 - protein, 27 aa, Artificial Sequence
  Cyclic GFR-binding peptide
DSANNVVPIKGYIIQQKDNFYLMNIPS

SEQ ID NO: 125126 - protein, 27 aa, Artificial Sequence
  Cyclic GFR-binding peptide
DSANNVVRYKKLIVNNSSDFYLVSIAN

SEQ ID NO: 125127 - protein, 27 aa, Artificial Sequence
  Cyclic GFR-binding peptide
DSANNVVPIKGYVVNNAADFYLINIPS

SEQ ID NO: 125128 - protein, 27 aa, Artificial Sequence
  Cyclic GFR-binding peptide
DSANNVVRHKRLVKPTRGVYYLISTAS

SEQ ID NO: 125129 - protein, 27 aa, Artificial Sequence
  Cyclic GFR-binding peptide
DSANNVVEYKFKIVNNSSDLYLVSIPE

SEQ ID NO: 125130 - protein, 27 aa, Artificial Sequence
  Cyclic GFR-binding peptide
DSANNVVRHKRLVVNNASDYYLISTAS

SEQ ID NO: 125131 - protein, 27 aa, Artificial Sequence
  Cyclic GFR-binding peptide
DSANNVVRHKRLTPVGMDDYYLVSTAS

SEQ ID NO: 125132 - protein, 27 aa, Artificial Sequence
  Cyclic GFR-binding peptide
DSANNVVYHYKLIVNNSSDKYLVSIPS

SEQ ID NO: 125133 - protein, 27 aa, Artificial Sequence
  Cyclic GFR-binding peptide
DSANNVVYHYKLVVNNASDKYLISIPS

SEQ ID NO: 125134 - protein, 27 aa, Artificial Sequence
  Cyclic GFR-binding peptide
DSANNVVEYKFKIVNSSDDLYLVSIPE

SEQ ID NO: 125135 - protein, 27 aa, Artificial Sequence
  Cyclic GFR-binding peptide
DSANNVVEYKFKVKPKRGVLYLISIPE

SEQ ID NO: 125136 - protein, 27 aa, Artificial Sequence
  Cyclic GFR-binding peptide
DSANNVVRHKRLVVKDYEDYYLMSTAS

SEQ ID NO: 125137 - protein, 27 aa, Artificial Sequence
  Cyclic GFR-binding peptide
DSANNVVEYKFKVVKENEDLYLMSIPE

SEQ ID NO: 125138 - protein, 27 aa, Artificial Sequence
  Cyclic GFR-binding peptide
DSANNVVEYKFKYTVVGKDLYLISIPE

SEQ ID NO: 125139 - protein, 27 aa, Artificial Sequence
  Cyclic GFR-binding peptide
DSANNVVPIKGYVVNNASDFYLINIPS

SEQ ID NO: 125140 - protein, 27 aa, Artificial Sequence
  Cyclic GFR-binding peptide
DSANNVVYHYKLIIQQKDNKYLMSIPS

SEQ ID NO: 125141 - protein, 27 aa, Artificial Sequence
  Cyclic GFR-binding peptide
DSANNVVRYKKLVVNNASDFYLISIAN

SEQ ID NO: 125142 - protein, 27 aa, Artificial Sequence
  Cyclic GFR-binding peptide
DSANNVVRHKRLVVNNAADYYLISTAS

SEQ ID NO: 125143 - protein, 27 aa, Artificial Sequence
  Cyclic GFR-binding peptide
EPISILYLVGRTPKVKFKYEDSANNVV

SEQ ID NO: 125144 - protein, 27 aa, Artificial Sequence
  Cyclic GFR-binding peptide
SPISMLYKDEYDKVVLKYHYDSANNVV

SEQ ID NO: 125145 - protein, 27 aa, Artificial Sequence
  Cyclic GFR-binding peptide
EPISVLYLDDMGVPTKFKYEDSANNVV

SEQ ID NO: 125146 - protein, 27 aa, Artificial Sequence
  Cyclic GFR-binding peptide
NAISMLYFDEYDKVVLKKYRDSANNVV

SEQ ID NO: 125147 - protein, 27 aa, Artificial Sequence
  Cyclic GFR-binding peptide
SATSILYYVGRKPKVLRKHRDSANNVV

SEQ ID NO: 125148 - protein, 27 aa, Artificial Sequence
  Cyclic GFR-binding peptide
SPISILYKVGRKPKVLKYHYDSANNVV

SEQ ID NO: 125149 - protein, 27 aa, Artificial Sequence
  Cyclic GFR-binding peptide
EPISILYLIGKTPKIKFKYEDSANNVV

SEQ ID NO: 125150 - protein, 27 aa, Artificial Sequence
  Cyclic GFR-binding peptide
EPISILYLDENKNVVKFKYEDSANNVV

SEQ ID NO: 125151 - protein, 27 aa, Artificial Sequence
  Cyclic GFR-binding peptide
SPINILYFVGRTPKVYGKIPDSANNVV

SEQ ID NO: 125152 - protein, 27 aa, Artificial Sequence
  Cyclic GFR-binding peptide
SPINMLYFDENEKVVYGKIPDSANNVV

SEQ ID NO: 125153 - protein, 27 aa, Artificial Sequence
  Cyclic GFR-binding peptide
SPISILYKDKGVVTYLKYHYDSANNVV

SEQ ID NO: 125154 - protein, 27 aa, Artificial Sequence
  Cyclic GFR-binding peptide
EPISMLYLDNGRVLLKFKYEDSANNVV

SEQ ID NO: 125155 - protein, 27 aa, Artificial Sequence
  Cyclic GFR-binding peptide
NAISILYFVGRKPKVLKKYRDSANNVV

SEQ ID NO: 125156 - protein, 27 aa, Artificial Sequence
  Cyclic GFR-binding peptide
SPINVLYFDDMGVPTYGKIPDSANNVV

SEQ ID NO: 125157 - protein, 27 aa, Artificial Sequence
  Cyclic GFR-binding peptide
SPISILYKDENKNVVLKYHYDSANNVV

SEQ ID NO: 125158 - protein, 27 aa, Artificial Sequence
  Cyclic GFR-binding peptide
SPISVLYKDDSSNVILKYHYDSANNVV

SEQ ID NO: 125159 - protein, 27 aa, Artificial Sequence
  Cyclic GFR-binding peptide
SPINVLYFDDSSNVIYGKIPDSANNVV

SEQ ID NO: 125160 - protein, 27 aa, Artificial Sequence
  Cyclic GFR-binding peptide
NAISILYFDKGVVTYLKKYRDSANNVV

SEQ ID NO: 125161 - protein, 27 aa, Artificial Sequence
  Cyclic GFR-binding peptide
SATSMLYYDNGRVLLLRKHRDSANNVV

SEQ ID NO: 125162 - protein, 27 aa, Artificial Sequence
  Cyclic GFR-binding peptide
SPISMLYKDNGRVLLLKYHYDSANNVV

SEQ ID NO: 125163 - protein, 27 aa, Artificial Sequence
  Cyclic GFR-binding peptide
NAISVLYFDDSSNVILKKYRDSANNVV

SEQ ID NO: 125164 - protein, 27 aa, Artificial Sequence
  Cyclic GFR-binding peptide
SATSILYYDENKNVVLRKHRDSANNVV

SEQ ID NO: 125165 - protein, 27 aa, Artificial Sequence
  Cyclic GFR-binding peptide
SATSILYYIGKTPKILRKHRDSANNVV

SEQ ID NO: 125166 - protein, 27 aa, Artificial Sequence
  Cyclic GFR-binding peptide
SPINILYFDKGVVTYYGKIPDSANNVV

SEQ ID NO: 125167 - protein, 27 aa, Artificial Sequence
  Cyclic GFR-binding peptide
SPISVLYKDDMGVPTLKYHYDSANNVV

SEQ ID NO: 125168 - protein, 27 aa, Artificial Sequence
  Cyclic GFR-binding peptide
SATSVLYYDSSNNVILRKHRDSANNVV

SEQ ID NO: 125169 - protein, 27 aa, Artificial Sequence
  Cyclic GFR-binding peptide
NAISMLYFDNGRVLLLKKYRDSANNVV

SEQ ID NO: 125170 - protein, 27 aa, Artificial Sequence
  Cyclic GFR-binding peptide
SPISILYKVGRTPKVLKYHYDSANNVV

SEQ ID NO: 125171 - protein, 27 aa, Artificial Sequence
  Cyclic GFR-binding peptide
SATSVLYYDDSSNVILRKHRDSANNVV

SEQ ID NO: 125172 - protein, 27 aa, Artificial Sequence
  Cyclic GFR-binding peptide
SPINMLYFDNGRVLLYGKIPDSANNVV

SEQ ID NO: 125173 - protein, 27 aa, Artificial Sequence
  Cyclic GFR-binding peptide
NAISILYFDENKNVVLKKYRDSANNVV

SEQ ID NO: 125174 - protein, 27 aa, Artificial Sequence
  Cyclic GFR-binding peptide
EPISMLYLDEYDKVVKFKYEDSANNVV

SEQ ID NO: 125175 - protein, 27 aa, Artificial Sequence
  Cyclic GFR-binding peptide
SPINILYFDENKNVVYGKIPDSANNVV

SEQ ID NO: 125176 - protein, 27 aa, Artificial Sequence
  Cyclic GFR-binding peptide
SPINILYFIGKTPKIYGKIPDSANNVV

SEQ ID NO: 125177 - protein, 27 aa, Artificial Sequence
  Cyclic GFR-binding peptide
EPISILYLDAANNVVKFKYEDSANNVV

SEQ ID NO: 125178 - protein, 27 aa, Artificial Sequence
  Cyclic GFR-binding peptide
SATSILYYDKGVVTYLRKHRDSANNVV

SEQ ID NO: 125179 - protein, 27 aa, Artificial Sequence
  Cyclic GFR-binding peptide
NAISILYFIGKTPKILKKYRDSANNVV

SEQ ID NO: 125180 - protein, 27 aa, Artificial Sequence
  Cyclic GFR-binding peptide
SPINMLYFDEYDKVVYGKIPDSANNVV

SEQ ID NO: 125181 - protein, 27 aa, Artificial Sequence
  Cyclic GFR-binding peptide
EPISILYLDSANNVVKFKYEDSANNVV

SEQ ID NO: 125182 - protein, 27 aa, Artificial Sequence
  Cyclic GFR-binding peptide
NAISILYFVGRTPKVLKKYRDSANNVV

SEQ ID NO: 125183 - protein, 27 aa, Artificial Sequence
  Cyclic GFR-binding peptide
SATSMLYYDENEKVVLRKHRDSANNVV

SEQ ID NO: 125184 - protein, 27 aa, Artificial Sequence
  Cyclic GFR-binding peptide
SPISILYKIGKTPKILKYHYDSANNVV

SEQ ID NO: 125185 - protein, 27 aa, Artificial Sequence
  Cyclic GFR-binding peptide
SPISMLYKDENEKVVLKYHYDSANNVV

SEQ ID NO: 125186 - protein, 27 aa, Artificial Sequence
  Cyclic GFR-binding peptide
SATSMLYYNDKQQIILRKHRDSANNVV

SEQ ID NO: 125187 - protein, 27 aa, Artificial Sequence
  Cyclic GFR-binding peptide
NAISMLYFDENEKVVLKKYRDSANNVV

SEQ ID NO: 125188 - protein, 27 aa, Artificial Sequence
  Cyclic GFR-binding peptide
NAISILYFDAANNVVLKKYRDSANNVV

SEQ ID NO: 125189 - protein, 27 aa, Artificial Sequence
  Cyclic GFR-binding peptide
EPISMLYLNDKQQIIKFKYEDSANNVV

SEQ ID NO: 125190 - protein, 27 aa, Artificial Sequence
  Cyclic GFR-binding peptide
NAISVLYFDDMGVPTLKKYRDSANNVV

SEQ ID NO: 125191 - protein, 27 aa, Artificial Sequence
  Cyclic GFR-binding peptide
SPISILYKDAANNVVLKYHYDSANNVV

SEQ ID NO: 125192 - protein, 27 aa, Artificial Sequence
  Cyclic GFR-binding peptide
SPINVLYFDSSNNVIYGKIPDSANNVV

SEQ ID NO: 125193 - protein, 27 aa, Artificial Sequence
  Cyclic GFR-binding peptide
SPINILYFVGRKPKVYGKIPDSANNVV

SEQ ID NO: 125194 - protein, 27 aa, Artificial Sequence
  Cyclic GFR-binding peptide
NAISMLYFNDKQQIILKKYRDSANNVV

SEQ ID NO: 125195 - protein, 27 aa, Artificial Sequence
  Cyclic GFR-binding peptide
SPINMLYFNDKQQIIYGKIPDSANNVV

SEQ ID NO: 125196 - protein, 27 aa, Artificial Sequence
  Cyclic GFR-binding peptide
NAISVLYFDSSNNVILKKYRDSANNVV

SEQ ID NO: 125197 - protein, 27 aa, Artificial Sequence
  Cyclic GFR-binding peptide
SPINILYFDAANNVVYGKIPDSANNVV

SEQ ID NO: 125198 - protein, 27 aa, Artificial Sequence
  Cyclic GFR-binding peptide
SATSILYYVGRTPKVLRKHRDSANNVV

SEQ ID NO: 125199 - protein, 27 aa, Artificial Sequence
  Cyclic GFR-binding peptide
EPISVLYLDSSNNVIKFKYEDSANNVV

SEQ ID NO: 125200 - protein, 27 aa, Artificial Sequence
  Cyclic GFR-binding peptide
SATSILYYDSANNVVLRKHRDSANNVV

SEQ ID NO: 125201 - protein, 27 aa, Artificial Sequence
  Cyclic GFR-binding peptide
SATSVLYYDDMGVPTLRKHRDSANNVV

SEQ ID NO: 125202 - protein, 27 aa, Artificial Sequence
  Cyclic GFR-binding peptide
SPISVLYKDSSNNVILKYHYDSANNVV

SEQ ID NO: 125203 - protein, 27 aa, Artificial Sequence
  Cyclic GFR-binding peptide
SPISILYKDSANNVVLKYHYDSANNVV

SEQ ID NO: 125204 - protein, 27 aa, Artificial Sequence
  Cyclic GFR-binding peptide
EPISVLYLDDSSNVIKFKYEDSANNVV

SEQ ID NO: 125205 - protein, 27 aa, Artificial Sequence
  Cyclic GFR-binding peptide
EPISILYLVGRKPKVKFKYEDSANNVV

SEQ ID NO: 125206 - protein, 27 aa, Artificial Sequence
  Cyclic GFR-binding peptide
SATSMLYYDEYDKVVLRKHRDSANNVV

SEQ ID NO: 125207 - protein, 27 aa, Artificial Sequence
  Cyclic GFR-binding peptide
EPISMLYLDENEKVVKFKYEDSANNVV

SEQ ID NO: 125208 - protein, 27 aa, Artificial Sequence
  Cyclic GFR-binding peptide
EPISILYLDKGVVTYKFKYEDSANNVV

SEQ ID NO: 125209 - protein, 27 aa, Artificial Sequence
  Cyclic GFR-binding peptide
SPINILYFDSANNVVYGKIPDSANNVV

SEQ ID NO: 125210 - protein, 27 aa, Artificial Sequence
  Cyclic GFR-binding peptide
SPISMLYKNDKQQIILKYHYDSANNVV

SEQ ID NO: 125211 - protein, 27 aa, Artificial Sequence
  Cyclic GFR-binding peptide
NAISILYFDSANNVVLKKYRDSANNVV

SEQ ID NO: 125212 - protein, 27 aa, Artificial Sequence
  Cyclic GFR-binding peptide
SATSILYYDAANNVVLRKHRDSANNVV

SEQ ID NO: 125213 - protein, 27 aa, Artificial Sequence
  Cyclic GFR-binding peptide
DSANNVVSMEGIIIQQKDNMIQMTINS

SEQ ID NO: 125214 - protein, 27 aa, Artificial Sequence
  Cyclic GFR-binding peptide
DSANNVVSMEGIIVNSSDDMIQVTINS

SEQ ID NO: 125215 - protein, 27 aa, Artificial Sequence
  Cyclic GFR-binding peptide
DSANNVVSMEGLVKPKRGVMIQITINS

SEQ ID NO: 125216 - protein, 27 aa, Artificial Sequence
  Cyclic GFR-binding peptide
DSANNVVSMEGLVVNNASDMIQITINS

SEQ ID NO: 125217 - protein, 29 aa, Artificial Sequence
  Cyclic GFR-binding peptide
DSANNVVSMEGIFIPKKRVIEMIQVTINS

SEQ ID NO: 125218 - protein, 27 aa, Artificial Sequence
  Cyclic GFR-binding peptide
DSANNVVSMEGILLVRGNDMIQMTINS

SEQ ID NO: 125219 - protein, 29 aa, Artificial Sequence
  Cyclic GFR-binding peptide
DSANNVVSMEGILKPKKRVYEMIQVTINS

SEQ ID NO: 125220 - protein, 27 aa, Artificial Sequence
  Cyclic GFR-binding peptide
DSANNVVSMEGLIKPTKGIMIQITINS

SEQ ID NO: 125221 - protein, 27 aa, Artificial Sequence
  Cyclic GFR-binding peptide
DSANNVVSMEGLIVNSSDDMIQVTINS

SEQ ID NO: 125222 - protein, 29 aa, Artificial Sequence
  Cyclic GFR-binding peptide
DSANNVVSMEGIHQGQHPKIRMIQMTINS

SEQ ID NO: 125223 - protein, 27 aa, Artificial Sequence
  Cyclic GFR-binding peptide
DSANNVVSMEGIVVNNASDMIQITINS

SEQ ID NO: 125224 - protein, 29 aa, Artificial Sequence
  Cyclic GFR-binding peptide
DSANNVVSMEGLLKPKKRVYEMIQVTINS

SEQ ID NO: 125225 - protein, 27 aa, Artificial Sequence
  Cyclic GFR-binding peptide
DSANNVVSMEGIVKPKRGVMIQITINS

SEQ ID NO: 125226 - protein, 27 aa, Artificial Sequence
  Cyclic GFR-binding peptide
DSANNVVSMEGIVKPTRGVMIQITINS

SEQ ID NO: 125227 - protein, 27 aa, Artificial Sequence
  Cyclic GFR-binding peptide
DSANNVVSMEGLVVNNAADMIQITINS

SEQ ID NO: 125228 - protein, 27 aa, Artificial Sequence
  Cyclic GFR-binding peptide
DSANNVVSMEGLLLVRGNDMIQMTINS

SEQ ID NO: 125229 - protein, 27 aa, Artificial Sequence
  Cyclic GFR-binding peptide
DSANNVVSMEGIIKPTKGIMIQITINS

SEQ ID NO: 125230 - protein, 27 aa, Artificial Sequence
  Cyclic GFR-binding peptide
DSANNVVSMEGLIIQQKDNMIQMTINS

SEQ ID NO: 125231 - protein, 29 aa, Artificial Sequence
  Cyclic GFR-binding peptide
DSANNVVSMEGLHQGQHPKIRMIQMTINS

SEQ ID NO: 125232 - protein, 27 aa, Artificial Sequence
  Cyclic GFR-binding peptide
DSANNVVSMEGIVVNNAADMIQITINS

SEQ ID NO: 125233 - protein, 29 aa, Artificial Sequence
  Cyclic GFR-binding peptide
DSANNVVSMEGLFIPKKRVIEMIQVTINS

SEQ ID NO: 125234 - protein, 27 aa, Artificial Sequence
  Cyclic GFR-binding peptide
DSANNVVSMEGLVKPTRGVMIQITINS

SEQ ID NO: 125235 - protein, 27 aa, Artificial Sequence
  Cyclic GFR-binding peptide
SNITMQIMNDKQQIIIGEMSDSANNVV

SEQ ID NO: 125236 - protein, 27 aa, Artificial Sequence
  Cyclic GFR-binding peptide
SNITVQIMDDSSNVIIGEMSDSANNVV

SEQ ID NO: 125237 - protein, 27 aa, Artificial Sequence
  Cyclic GFR-binding peptide
SNITIQIMVGRKPKVLGEMSDSANNVV

SEQ ID NO: 125238 - protein, 27 aa, Artificial Sequence
  Cyclic GFR-binding peptide
SNITIQIMDSANNVVLGEMSDSANNVV

SEQ ID NO: 125239 - protein, 29 aa, Artificial Sequence
  Cyclic GFR-binding peptide
SNITVQIMEIVRKKPIFIGEMSDSANNVV

SEQ ID NO: 125240 - protein, 27 aa, Artificial Sequence
  Cyclic GFR-binding peptide
SNITMQIMDNGRVLLIGEMSDSANNVV

SEQ ID NO: 125241 - protein, 29 aa, Artificial Sequence
  Cyclic GFR-binding peptide
SNITVQIMEYVRKKPKLIGEMSDSANNVV

SEQ ID NO: 125242 - protein, 27 aa, Artificial Sequence
  Cyclic GFR-binding peptide
SNITIQIMIGKTPKILGEMSDSANNVV

SEQ ID NO: 125243 - protein, 27 aa, Artificial Sequence
  Cyclic GFR-binding peptide
SNITVQIMDDSSNVILGEMSDSANNVV

SEQ ID NO: 125244 - protein, 29 aa, Artificial Sequence
  Cyclic GFR-binding peptide
SNITMQIMRIKPHQGQHIGEMSDSANNVV

SEQ ID NO: 125245 - protein, 27 aa, Artificial Sequence
  Cyclic GFR-binding peptide
SNITIQIMDSANNVVIGEMSDSANNVV

SEQ ID NO: 125246 - protein, 29 aa, Artificial Sequence
  Cyclic GFR-binding peptide
SNITVQIMEYVRKKPKLLGEMSDSANNVV

SEQ ID NO: 125247 - protein, 27 aa, Artificial Sequence
  Cyclic GFR-binding peptide
SNITIQIMVGRKPKVIGEMSDSANNVV

SEQ ID NO: 125248 - protein, 27 aa, Artificial Sequence
  Cyclic GFR-binding peptide
SNITIQIMVGRTPKVIGEMSDSANNVV

SEQ ID NO: 125249 - protein, 27 aa, Artificial Sequence
  Cyclic GFR-binding peptide
SNITIQIMDAANNVVLGEMSDSANNVV

SEQ ID NO: 125250 - protein, 27 aa, Artificial Sequence
  Cyclic GFR-binding peptide
SNITMQIMDNGRVLLLGEMSDSANNVV

SEQ ID NO: 125251 - protein, 27 aa, Artificial Sequence
  Cyclic GFR-binding peptide
SNITIQIMIGKTPKIIGEMSDSANNVV

SEQ ID NO: 125252 - protein, 27 aa, Artificial Sequence
  Cyclic GFR-binding peptide
SNITMQIMNDKQQIILGEMSDSANNVV

SEQ ID NO: 125253 - protein, 29 aa, Artificial Sequence
  Cyclic GFR-binding peptide
SNITMQIMRIKPHQGQHLGEMSDSANNVV

SEQ ID NO: 125254 - protein, 27 aa, Artificial Sequence
  Cyclic GFR-binding peptide
SNITIQIMDAANNVVIGEMSDSANNVV

SEQ ID NO: 125255 - protein, 29 aa, Artificial Sequence
  Cyclic GFR-binding peptide
SNITVQIMEIVRKKPIFLGEMSDSANNVV

SEQ ID NO: 125256 - protein, 27 aa, Artificial Sequence
  Cyclic GFR-binding peptide
SNITIQIMVGRTPKVLGEMSDSANNVV

SEQ ID NO: 125257 - protein, 27 aa, Artificial Sequence
  Cyclic GFR-binding peptide
DSANNVVRYKKLIKPTKGIFYLISIAN

SEQ ID NO: 125258 - protein, 27 aa, Artificial Sequence
  Cyclic GFR-binding peptide
DSANNVVQYNKLVVNKNEDLYLISIAS

SEQ ID NO: 125259 - protein, 27 aa, Artificial Sequence
  Cyclic GFR-binding peptide
DSANNVVQYNKLVVNNAADLYLISIAS

SEQ ID NO: 125260 - protein, 27 aa, Artificial Sequence
  Cyclic GFR-binding peptide
DSANNVVQYNKLIVNNSSDLYLVSIAS

SEQ ID NO: 125261 - protein, 27 aa, Artificial Sequence
  Cyclic GFR-binding peptide
DSANNVVRYKKLVVKDYEDFYLMSIAN

SEQ ID NO: 125262 - protein, 27 aa, Artificial Sequence
  Cyclic GFR-binding peptide
DSANNVVRYKKLVKPTRGVFYLISIAN

SEQ ID NO: 125263 - protein, 27 aa, Artificial Sequence
  Cyclic GFR-binding peptide
DSANNVVQYNKLIIQQKDNLYLMSIAS

SEQ ID NO: 125264 - protein, 27 aa, Artificial Sequence
  Cyclic GFR-binding peptide
DSANNVVQYNKLLLVRGNDLYLMSIAS

SEQ ID NO: 125265 - protein, 27 aa, Artificial Sequence
  Cyclic GFR-binding peptide
DSANNVVQYNKLVKPTRGVLYLISIAS

SEQ ID NO: 125266 - protein, 27 aa, Artificial Sequence
  Cyclic GFR-binding peptide
DSANNVVRYKKLVVKENEDFYLMSIAN

SEQ ID NO: 125267 - protein, 27 aa, Artificial Sequence
  Cyclic GFR-binding peptide
DSANNVVRYKKLVVNNAADFYLISIAN

SEQ ID NO: 125268 - protein, 27 aa, Artificial Sequence
  Cyclic GFR-binding peptide
DSANNVVQYNKLTPVGMDDLYLVSIAS

SEQ ID NO: 125269 - protein, 27 aa, Artificial Sequence
  Cyclic GFR-binding peptide
DSANNVVRYKKLTPVGMDDFYLVSIAN

SEQ ID NO: 125270 - protein, 27 aa, Artificial Sequence
  Cyclic GFR-binding peptide
DSANNVVRYKKLVKPKRGVFYLISIAN

SEQ ID NO: 125271 - protein, 27 aa, Artificial Sequence
  Cyclic GFR-binding peptide
DSANNVVQYNKLVVKENEDLYLMSIAS

SEQ ID NO: 125272 - protein, 27 aa, Artificial Sequence
  Cyclic GFR-binding peptide
DSANNVVRYKKLIIQQKDNFYLMSIAN

SEQ ID NO: 125273 - protein, 27 aa, Artificial Sequence
  Cyclic GFR-binding peptide
DSANNVVQYNKLVKPKRGVLYLISIAS

SEQ ID NO: 125274 - protein, 27 aa, Artificial Sequence
  Cyclic GFR-binding peptide
DSANNVVRYKKLIVNNSSDFYLVSIAN

SEQ ID NO: 125275 - protein, 27 aa, Artificial Sequence
  Cyclic GFR-binding peptide
DSANNVVRYKKLYTVVGKDFYLISIAN

SEQ ID NO: 125276 - protein, 27 aa, Artificial Sequence
  Cyclic GFR-binding peptide
DSANNVVRYKKLIVNSSDDFYLVSIAN

SEQ ID NO: 125277 - protein, 27 aa, Artificial Sequence
  Cyclic GFR-binding peptide
DSANNVVRYKKLLLVRGNDFYLMSIAN

SEQ ID NO: 125278 - protein, 27 aa, Artificial Sequence
  Cyclic GFR-binding peptide
DSANNVVQYNKLVVNNASDLYLISIAS

SEQ ID NO: 125279 - protein, 27 aa, Artificial Sequence
  Cyclic GFR-binding peptide
DSANNVVQYNKLIKPTKGILYLISIAS

SEQ ID NO: 125280 - protein, 27 aa, Artificial Sequence
  Cyclic GFR-binding peptide
DSANNVVRYKKLVVNKNEDFYLISIAN

SEQ ID NO: 125281 - protein, 27 aa, Artificial Sequence
  Cyclic GFR-binding peptide
DSANNVVQYNKLYTVVGKDLYLISIAS

SEQ ID NO: 125282 - protein, 27 aa, Artificial Sequence
  Cyclic GFR-binding peptide
DSANNVVQYNKLVVKDYEDLYLMSIAS

SEQ ID NO: 125283 - protein, 27 aa, Artificial Sequence
  Cyclic GFR-binding peptide
DSANNVVRYKKLVVNNASDFYLISIAN

SEQ ID NO: 125284 - protein, 27 aa, Artificial Sequence
  Cyclic GFR-binding peptide
DSANNVVQYNKLIVNSSDDLYLVSIAS

SEQ ID NO: 125285 - protein, 27 aa, Artificial Sequence
  Cyclic GFR-binding peptide
NAISILYFIGKTPKILKKYRDSANNVV

SEQ ID NO: 125286 - protein, 27 aa, Artificial Sequence
  Cyclic GFR-binding peptide
SAISILYLDENKNVVLKNYQDSANNVV

SEQ ID NO: 125287 - protein, 27 aa, Artificial Sequence
  Cyclic GFR-binding peptide
SAISILYLDAANNVVLKNYQDSANNVV

SEQ ID NO: 125288 - protein, 27 aa, Artificial Sequence
  Cyclic GFR-binding peptide
SAISVLYLDSSNNVILKNYQDSANNVV

SEQ ID NO: 125289 - protein, 27 aa, Artificial Sequence
  Cyclic GFR-binding peptide
NAISMLYFDEYDKVVLKKYRDSANNVV

SEQ ID NO: 125290 - protein, 27 aa, Artificial Sequence
  Cyclic GFR-binding peptide
NAISILYFVGRTPKVLKKYRDSANNVV

SEQ ID NO: 125291 - protein, 27 aa, Artificial Sequence
  Cyclic GFR-binding peptide
SAISMLYLNDKQQIILKNYQDSANNVV

SEQ ID NO: 125292 - protein, 27 aa, Artificial Sequence
  Cyclic GFR-binding peptide
SAISMLYLDNGRVLLLKNYQDSANNVV

SEQ ID NO: 125293 - protein, 27 aa, Artificial Sequence
  Cyclic GFR-binding peptide
SAISILYLVGRTPKVLKNYQDSANNVV

SEQ ID NO: 125294 - protein, 27 aa, Artificial Sequence
  Cyclic GFR-binding peptide
NAISMLYFDENEKVVLKKYRDSANNVV

SEQ ID NO: 125295 - protein, 27 aa, Artificial Sequence
  Cyclic GFR-binding peptide
NAISILYFDAANNVVLKKYRDSANNVV

SEQ ID NO: 125296 - protein, 27 aa, Artificial Sequence
  Cyclic GFR-binding peptide
SAISVLYLDDMGVPTLKNYQDSANNVV

SEQ ID NO: 125297 - protein, 27 aa, Artificial Sequence
  Cyclic GFR-binding peptide
NAISVLYFDDMGVPTLKKYRDSANNVV

SEQ ID NO: 125298 - protein, 27 aa, Artificial Sequence
  Cyclic GFR-binding peptide
NAISILYFVGRKPKVLKKYRDSANNVV

SEQ ID NO: 125299 - protein, 27 aa, Artificial Sequence
  Cyclic GFR-binding peptide
SAISMLYLDENEKVVLKNYQDSANNVV

SEQ ID NO: 125300 - protein, 27 aa, Artificial Sequence
  Cyclic GFR-binding peptide
NAISMLYFNDKQQIILKKYRDSANNVV

SEQ ID NO: 125301 - protein, 27 aa, Artificial Sequence
  Cyclic GFR-binding peptide
SAISILYLVGRKPKVLKNYQDSANNVV

SEQ ID NO: 125302 - protein, 27 aa, Artificial Sequence
  Cyclic GFR-binding peptide
NAISVLYFDSSNNVILKKYRDSANNVV

SEQ ID NO: 125303 - protein, 27 aa, Artificial Sequence
  Cyclic GFR-binding peptide
NAISILYFDKGVVTYLKKYRDSANNVV

SEQ ID NO: 125304 - protein, 27 aa, Artificial Sequence
  Cyclic GFR-binding peptide
NAISVLYFDDSSNVILKKYRDSANNVV

SEQ ID NO: 125305 - protein, 27 aa, Artificial Sequence
  Cyclic GFR-binding peptide
NAISMLYFDNGRVLLLKKYRDSANNVV

SEQ ID NO: 125306 - protein, 27 aa, Artificial Sequence
  Cyclic GFR-binding peptide
SAISILYLDSANNVVLKNYQDSANNVV

SEQ ID NO: 125307 - protein, 27 aa, Artificial Sequence
  Cyclic GFR-binding peptide
SAISILYLIGKTPKILKNYQDSANNVV

SEQ ID NO: 125308 - protein, 27 aa, Artificial Sequence
  Cyclic GFR-binding peptide
NAISILYFDENKNVVLKKYRDSANNVV

SEQ ID NO: 125309 - protein, 27 aa, Artificial Sequence
  Cyclic GFR-binding peptide
SAISILYLDKGVVTYLKNYQDSANNVV

SEQ ID NO: 125310 - protein, 27 aa, Artificial Sequence
  Cyclic GFR-binding peptide
SAISMLYLDEYDKVVLKNYQDSANNVV

SEQ ID NO: 125311 - protein, 27 aa, Artificial Sequence
  Cyclic GFR-binding peptide
NAISILYFDSANNVVLKKYRDSANNVV

SEQ ID NO: 125312 - protein, 27 aa, Artificial Sequence
  Cyclic GFR-binding peptide
SAISVLYLDDSSNVILKNYQDSANNVV

SEQ ID NO: 125313 - protein, 29 aa, Artificial Sequence
  Cyclic GFR-binding peptide
DSANNVVVTAKKLKPKKRVYEIKRVQVPR

SEQ ID NO: 125314 - protein, 29 aa, Artificial Sequence
  Cyclic GFR-binding peptide
DSANNVVVQVEKLKPKKRVYEVKAVKVSR

SEQ ID NO: 125315 - protein, 27 aa, Artificial Sequence
  Cyclic GFR-binding peptide
DSANNVVVTAKKVKPTRGVIKRIQVPR

SEQ ID NO: 125316 - protein, 29 aa, Artificial Sequence
  Cyclic GFR-binding peptide
DSANNVVVQVEKFIPKKRVIEVKAVKVSR

SEQ ID NO: 125317 - protein, 29 aa, Artificial Sequence
  Cyclic GFR-binding peptide
DSANNVVVQVEKHQGQHPKIRVKAMKVSR

SEQ ID NO: 125318 - protein, 29 aa, Artificial Sequence
  Cyclic GFR-binding peptide
DSANNVVVTAKKHQGQHPKIRIKRMQVPR

SEQ ID NO: 125319 - protein, 27 aa, Artificial Sequence
  Cyclic GFR-binding peptide
DSANNVVVTAKKIKPTKGIIKRIQVPR

SEQ ID NO: 125320 - protein, 27 aa, Artificial Sequence
  Cyclic GFR-binding peptide
DSANNVVVQVEKVKPKRGVVKAIKVSR

SEQ ID NO: 125321 - protein, 27 aa, Artificial Sequence
  Cyclic GFR-binding peptide
DSANNVVVTAKKVKPKRGVIKRIQVPR

SEQ ID NO: 125322 - protein, 27 aa, Artificial Sequence
  Cyclic GFR-binding peptide
DSANNVVVQVEKIKPTKGIVKAIKVSR

SEQ ID NO: 125323 - protein, 27 aa, Artificial Sequence
  Cyclic GFR-binding peptide
DSANNVVVQVEKVKPTRGVVKAIKVSR

SEQ ID NO: 125324 - protein, 29 aa, Artificial Sequence
  Cyclic GFR-binding peptide
DSANNVVVTAKKFIPKKRVIEIKRVQVPR

SEQ ID NO: 125325 - protein, 29 aa, Artificial Sequence
  Cyclic GFR-binding peptide
RPVQVRKIEYVRKKPKLKKATVDSANNVV

SEQ ID NO: 125326 - protein, 29 aa, Artificial Sequence
  Cyclic GFR-binding peptide
RSVKVAKVEYVRKKPKLKEVQVDSANNVV

SEQ ID NO: 125327 - protein, 27 aa, Artificial Sequence
  Cyclic GFR-binding peptide
RPVQIRKIVGRTPKVKKATVDSANNVV

SEQ ID NO: 125328 - protein, 29 aa, Artificial Sequence
  Cyclic GFR-binding peptide
RSVKVAKVEIVRKKPIFKEVQVDSANNVV

SEQ ID NO: 125329 - protein, 29 aa, Artificial Sequence
  Cyclic GFR-binding peptide
RSVKMAKVRIKPHQGQHKEVQVDSANNVV

SEQ ID NO: 125330 - protein, 29 aa, Artificial Sequence
  Cyclic GFR-binding peptide
RPVQMRKIRIKPHQGQHKKATVDSANNVV

SEQ ID NO: 125331 - protein, 27 aa, Artificial Sequence
  Cyclic GFR-binding peptide
RPVQIRKIIGKTPKIKKATVDSANNVV

SEQ ID NO: 125332 - protein, 27 aa, Artificial Sequence
  Cyclic GFR-binding peptide
RSVKIAKVVGRKPKVKEVQVDSANNVV

SEQ ID NO: 125333 - protein, 27 aa, Artificial Sequence
  Cyclic GFR-binding peptide
RPVQIRKIVGRKPKVKKATVDSANNVV

SEQ ID NO: 125334 - protein, 27 aa, Artificial Sequence
  Cyclic GFR-binding peptide
RSVKIAKVIGKTPKIKEVQVDSANNVV

SEQ ID NO: 125335 - protein, 27 aa, Artificial Sequence
  Cyclic GFR-binding peptide
RSVKIAKVVGRTPKVKEVQVDSANNVV

SEQ ID NO: 125336 - protein, 29 aa, Artificial Sequence
  Cyclic GFR-binding peptide
RPVQVRKIEIVRKKPIFKKATVDSANNVV

SEQ ID NO: 125337 - protein, 27 aa, Artificial Sequence
  Cyclic GFR-binding peptide
DNGRVLLRYKKLIKPTKGIFYLISIAN

SEQ ID NO: 125338 - protein, 29 aa, Artificial Sequence
  Cyclic GFR-binding peptide
DNGRVLLRHKRLFIPKKRVIEYYLVSTAS

SEQ ID NO: 125339 - protein, 27 aa, Artificial Sequence
  Cyclic GFR-binding peptide
DNGRVLLYHYKLVVKDYEDKYLMSIPS

SEQ ID NO: 125340 - protein, 27 aa, Artificial Sequence
  Cyclic GFR-binding peptide
DNGRVLLQYNKLIVNNSSDLYLVSIAS

SEQ ID NO: 125341 - protein, 27 aa, Artificial Sequence
  Cyclic GFR-binding peptide
DNGRVLLRYKKLVVKDYEDFYLMSIAN

SEQ ID NO: 125342 - protein, 27 aa, Artificial Sequence
  Cyclic GFR-binding peptide
DNGRVLLRYKKLVKPTRGVFYLISIAN

SEQ ID NO: 125343 - protein, 27 aa, Artificial Sequence
  Cyclic GFR-binding peptide
DNGRVLLRHKRLVVKENEDYYLMSTAS

SEQ ID NO: 125344 - protein, 27 aa, Artificial Sequence
  Cyclic GFR-binding peptide
DNGRVLLYHYKLIKPTKGIKYLISIPS

SEQ ID NO: 125345 - protein, 29 aa, Artificial Sequence
  Cyclic GFR-binding peptide
DNGRVLLRYKKLFIPKKRVIEFYLVSIAN

SEQ ID NO: 125346 - protein, 27 aa, Artificial Sequence
  Cyclic GFR-binding peptide
DNGRVLLYHYKLVVKENEDKYLMSIPS

SEQ ID NO: 125347 - protein, 27 aa, Artificial Sequence
  Cyclic GFR-binding peptide
DNGRVLLRHKRLVKPKRGVYYLISTAS

SEQ ID NO: 125348 - protein, 27 aa, Artificial Sequence
  Cyclic GFR-binding peptide
DNGRVLLYHYKLVKPKRGVKYLISIPS

SEQ ID NO: 125349 - protein, 29 aa, Artificial Sequence
  Cyclic GFR-binding peptide
DNGRVLLQYNKLFIPKKRVIELYLVSIAS

SEQ ID NO: 125350 - protein, 27 aa, Artificial Sequence
  Cyclic GFR-binding peptide
DNGRVLLQYNKLVKPTRGVLYLISIAS

SEQ ID NO: 125351 - protein, 27 aa, Artificial Sequence
  Cyclic GFR-binding peptide
DNGRVLLRYKKLVVKENEDFYLMSIAN

SEQ ID NO: 125352 - protein, 27 aa, Artificial Sequence
  Cyclic GFR-binding peptide
DNGRVLLQYNKLTPVGMDDLYLVSIAS

SEQ ID NO: 125353 - protein, 27 aa, Artificial Sequence
  Cyclic GFR-binding peptide
DNGRVLLRYKKLTPVGMDDFYLVSIAN

SEQ ID NO: 125354 - protein, 27 aa, Artificial Sequence
  Cyclic GFR-binding peptide
DNGRVLLRYKKLVKPKRGVFYLISIAN

SEQ ID NO: 125355 - protein, 27 aa, Artificial Sequence
  Cyclic GFR-binding peptide
DNGRVLLQYNKLVVKENEDLYLMSIAS

SEQ ID NO: 125356 - protein, 27 aa, Artificial Sequence
  Cyclic GFR-binding peptide
DNGRVLLYHYKLIVNSSDDKYLVSIPS

SEQ ID NO: 125357 - protein, 27 aa, Artificial Sequence
  Cyclic GFR-binding peptide
DNGRVLLQYNKLVKPKRGVLYLISIAS

SEQ ID NO: 125358 - protein, 27 aa, Artificial Sequence
  Cyclic GFR-binding peptide
DNGRVLLRYKKLIVNNSSDFYLVSIAN

SEQ ID NO: 125359 - protein, 27 aa, Artificial Sequence
  Cyclic GFR-binding peptide
DNGRVLLRYKKLIVNSSDDFYLVSIAN

SEQ ID NO: 125360 - protein, 27 aa, Artificial Sequence
  Cyclic GFR-binding peptide
DNGRVLLRHKRLVKPTRGVYYLISTAS

SEQ ID NO: 125361 - protein, 29 aa, Artificial Sequence
  Cyclic GFR-binding peptide
DNGRVLLYHYKLFIPKKRVIEKYLVSIPS

SEQ ID NO: 125362 - protein, 27 aa, Artificial Sequence
  Cyclic GFR-binding peptide
DNGRVLLRHKRLIKPTKGIYYLISTAS

SEQ ID NO: 125363 - protein, 27 aa, Artificial Sequence
  Cyclic GFR-binding peptide
DNGRVLLRHKRLTPVGMDDYYLVSTAS

SEQ ID NO: 125364 - protein, 27 aa, Artificial Sequence
  Cyclic GFR-binding peptide
DNGRVLLYHYKLTPVGMDDKYLVSIPS

SEQ ID NO: 125365 - protein, 27 aa, Artificial Sequence
  Cyclic GFR-binding peptide
DNGRVLLYHYKLIVNNSSDKYLVSIPS

SEQ ID NO: 125366 - protein, 27 aa, Artificial Sequence
  Cyclic GFR-binding peptide
DNGRVLLRHKRLIVNNSSDYYLVSTAS

SEQ ID NO: 125367 - protein, 27 aa, Artificial Sequence
  Cyclic GFR-binding peptide
DNGRVLLYHYKLVKPTRGVKYLISIPS

SEQ ID NO: 125368 - protein, 27 aa, Artificial Sequence
  Cyclic GFR-binding peptide
DNGRVLLRHKRLIVNSSDDYYLVSTAS

SEQ ID NO: 125369 - protein, 27 aa, Artificial Sequence
  Cyclic GFR-binding peptide
DNGRVLLRHKRLVVKDYEDYYLMSTAS

SEQ ID NO: 125370 - protein, 27 aa, Artificial Sequence
  Cyclic GFR-binding peptide
DNGRVLLQYNKLIKPTKGILYLISIAS

SEQ ID NO: 125371 - protein, 27 aa, Artificial Sequence
  Cyclic GFR-binding peptide
DNGRVLLQYNKLVVKDYEDLYLMSIAS

SEQ ID NO: 125372 - protein, 27 aa, Artificial Sequence
  Cyclic GFR-binding peptide
DNGRVLLQYNKLIVNSSDDLYLVSIAS

SEQ ID NO: 125373 - protein, 27 aa, Artificial Sequence
  Cyclic GFR-binding peptide
NAISILYFIGKTPKILKKYRDNGRVLL

SEQ ID NO: 125374 - protein, 29 aa, Artificial Sequence
  Cyclic GFR-binding peptide
SATSVLYYEIVRKKPIFLRKHRDNGRVLL

SEQ ID NO: 125375 - protein, 27 aa, Artificial Sequence
  Cyclic GFR-binding peptide
SPISMLYKDEYDKVVLKYHYDNGRVLL

SEQ ID NO: 125376 - protein, 27 aa, Artificial Sequence
  Cyclic GFR-binding peptide
SAISVLYLDSSNNVILKNYQDNGRVLL

SEQ ID NO: 125377 - protein, 27 aa, Artificial Sequence
  Cyclic GFR-binding peptide
NAISMLYFDEYDKVVLKKYRDNGRVLL

SEQ ID NO: 125378 - protein, 27 aa, Artificial Sequence
  Cyclic GFR-binding peptide
NAISILYFVGRTPKVLKKYRDNGRVLL

SEQ ID NO: 125379 - protein, 27 aa, Artificial Sequence
  Cyclic GFR-binding peptide
SATSMLYYDENEKVVLRKHRDNGRVLL

SEQ ID NO: 125380 - protein, 27 aa, Artificial Sequence
  Cyclic GFR-binding peptide
SPISILYKIGKTPKILKYHYDNGRVLL

SEQ ID NO: 125381 - protein, 29 aa, Artificial Sequence
  Cyclic GFR-binding peptide
NAISVLYFEIVRKKPIFLKKYRDNGRVLL

SEQ ID NO: 125382 - protein, 27 aa, Artificial Sequence
  Cyclic GFR-binding peptide
SPISMLYKDENEKVVLKYHYDNGRVLL

SEQ ID NO: 125383 - protein, 27 aa, Artificial Sequence
  Cyclic GFR-binding peptide
SATSILYYVGRKPKVLRKHRDNGRVLL

SEQ ID NO: 125384 - protein, 27 aa, Artificial Sequence
  Cyclic GFR-binding peptide
SPISILYKVGRKPKVLKYHYDNGRVLL

SEQ ID NO: 125385 - protein, 29 aa, Artificial Sequence
  Cyclic GFR-binding peptide
SAISVLYLEIVRKKPIFLKNYQDNGRVLL

SEQ ID NO: 125386 - protein, 27 aa, Artificial Sequence
  Cyclic GFR-binding peptide
SAISILYLVGRTPKVLKNYQDNGRVLL

SEQ ID NO: 125387 - protein, 27 aa, Artificial Sequence
  Cyclic GFR-binding peptide
NAISMLYFDENEKVVLKKYRDNGRVLL

SEQ ID NO: 125388 - protein, 27 aa, Artificial Sequence
  Cyclic GFR-binding peptide
SAISVLYLDDMGVPTLKNYQDNGRVLL

SEQ ID NO: 125389 - protein, 27 aa, Artificial Sequence
  Cyclic GFR-binding peptide
NAISVLYFDDMGVPTLKKYRDNGRVLL

SEQ ID NO: 125390 - protein, 27 aa, Artificial Sequence
  Cyclic GFR-binding peptide
NAISILYFVGRKPKVLKKYRDNGRVLL

SEQ ID NO: 125391 - protein, 27 aa, Artificial Sequence
  Cyclic GFR-binding peptide
SAISMLYLDENEKVVLKNYQDNGRVLL

SEQ ID NO: 125392 - protein, 27 aa, Artificial Sequence
  Cyclic GFR-binding peptide
SPISVLYKDDSSNVILKYHYDNGRVLL

SEQ ID NO: 125393 - protein, 27 aa, Artificial Sequence
  Cyclic GFR-binding peptide
SAISILYLVGRKPKVLKNYQDNGRVLL

SEQ ID NO: 125394 - protein, 27 aa, Artificial Sequence
  Cyclic GFR-binding peptide
NAISVLYFDSSNNVILKKYRDNGRVLL

SEQ ID NO: 125395 - protein, 27 aa, Artificial Sequence
  Cyclic GFR-binding peptide
NAISVLYFDDSSNVILKKYRDNGRVLL

SEQ ID NO: 125396 - protein, 27 aa, Artificial Sequence
  Cyclic GFR-binding peptide
SATSILYYVGRTPKVLRKHRDNGRVLL

SEQ ID NO: 125397 - protein, 29 aa, Artificial Sequence
  Cyclic GFR-binding peptide
SPISVLYKEIVRKKPIFLKYHYDNGRVLL

SEQ ID NO: 125398 - protein, 27 aa, Artificial Sequence
  Cyclic GFR-binding peptide
SATSILYYIGKTPKILRKHRDNGRVLL

SEQ ID NO: 125399 - protein, 27 aa, Artificial Sequence
  Cyclic GFR-binding peptide
SATSVLYYDDMGVPTLRKHRDNGRVLL

SEQ ID NO: 125400 - protein, 27 aa, Artificial Sequence
  Cyclic GFR-binding peptide
SPISVLYKDDMGVPTLKYHYDNGRVLL

SEQ ID NO: 125401 - protein, 27 aa, Artificial Sequence
  Cyclic GFR-binding peptide
SPISVLYKDSSNNVILKYHYDNGRVLL

SEQ ID NO: 125402 - protein, 27 aa, Artificial Sequence
  Cyclic GFR-binding peptide
SATSVLYYDSSNNVILRKHRDNGRVLL

SEQ ID NO: 125403 - protein, 27 aa, Artificial Sequence
  Cyclic GFR-binding peptide
SPISILYKVGRTPKVLKYHYDNGRVLL

SEQ ID NO: 125404 - protein, 27 aa, Artificial Sequence
  Cyclic GFR-binding peptide
SATSVLYYDDSSNVILRKHRDNGRVLL

SEQ ID NO: 125405 - protein, 27 aa, Artificial Sequence
  Cyclic GFR-binding peptide
SATSMLYYDEYDKVVLRKHRDNGRVLL

SEQ ID NO: 125406 - protein, 27 aa, Artificial Sequence
  Cyclic GFR-binding peptide
SAISILYLIGKTPKILKNYQDNGRVLL

SEQ ID NO: 125407 - protein, 27 aa, Artificial Sequence
  Cyclic GFR-binding peptide
SAISMLYLDEYDKVVLKNYQDNGRVLL

SEQ ID NO: 125408 - protein, 27 aa, Artificial Sequence
  Cyclic GFR-binding peptide
SAISVLYLDDSSNVILKNYQDNGRVLL

SEQ ID NO: 125409 - protein, 27 aa, Artificial Sequence
  Cyclic GFR-binding peptide
DNGRVLLRYKKLIKPTKGIFYLISIAN

SEQ ID NO: 125410 - protein, 27 aa, Artificial Sequence
  Cyclic GFR-binding peptide
DNGRVLLNSLQEVVKDYEDYYLMTLPE

SEQ ID NO: 125411 - protein, 27 aa, Artificial Sequence
  Cyclic GFR-binding peptide
DNGRVLLNSLQEIKPTKGIYYVIPLPE

SEQ ID NO: 125412 - protein, 27 aa, Artificial Sequence
  Cyclic GFR-binding peptide
DNGRVLLNSLQEVKPKRGVYYLITLPE

SEQ ID NO: 125413 - protein, 27 aa, Artificial Sequence
  Cyclic GFR-binding peptide
DNGRVLLNSLQEVKPTRGVYYVIPLPE

SEQ ID NO: 125414 - protein, 27 aa, Artificial Sequence
  Cyclic GFR-binding peptide
DNGRVLLRYKKLVVKDYEDFYLMSIAN

SEQ ID NO: 125415 - protein, 27 aa, Artificial Sequence
  Cyclic GFR-binding peptide
DNGRVLLEYQKYIVNSSDDIFLVSIPS

SEQ ID NO: 125416 - protein, 27 aa, Artificial Sequence
  Cyclic GFR-binding peptide
DNGRVLLEYQKYVKPTRGVIFLISIPS

SEQ ID NO: 125417 - protein, 27 aa, Artificial Sequence
  Cyclic GFR-binding peptide
DNGRVLLNSLQEVVKENEDYYLMTLPE

SEQ ID NO: 125418 - protein, 27 aa, Artificial Sequence
  Cyclic GFR-binding peptide
DNGRVLLRYKKLVKPTRGVFYLISIAN

SEQ ID NO: 125419 - protein, 27 aa, Artificial Sequence
  Cyclic GFR-binding peptide
DNGRVLLNSLQEVVNNASDYYLITLPE

SEQ ID NO: 125420 - protein, 27 aa, Artificial Sequence
  Cyclic GFR-binding peptide
DNGRVLLNSLQEVKPKRGVYYVIPLPE

SEQ ID NO: 125421 - protein, 27 aa, Artificial Sequence
  Cyclic GFR-binding peptide
DNGRVLLNSLQEVVNNASDYYVIPLPE

SEQ ID NO: 125422 - protein, 27 aa, Artificial Sequence
  Cyclic GFR-binding peptide
DNGRVLLNSLQEVKPTRGVYYLITLPE

SEQ ID NO: 125423 - protein, 27 aa, Artificial Sequence
  Cyclic GFR-binding peptide
DNGRVLLQYNKLVKPTRGVLYLISIAS

SEQ ID NO: 125424 - protein, 27 aa, Artificial Sequence
  Cyclic GFR-binding peptide
DNGRVLLRYKKLVVKENEDFYLMSIAN

SEQ ID NO: 125425 - protein, 27 aa, Artificial Sequence
  Cyclic GFR-binding peptide
DNGRVLLEYQKYIKPTKGIIFLISIPS

SEQ ID NO: 125426 - protein, 27 aa, Artificial Sequence
  Cyclic GFR-binding peptide
DNGRVLLEYQKYVVNNASDIFLISIPS

SEQ ID NO: 125427 - protein, 27 aa, Artificial Sequence
  Cyclic GFR-binding peptide
DNGRVLLRYKKLVKPKRGVFYLISIAN

SEQ ID NO: 125428 - protein, 27 aa, Artificial Sequence
  Cyclic GFR-binding peptide
DNGRVLLNSLQEIVNSSDDYYVVPLPE

SEQ ID NO: 125429 - protein, 27 aa, Artificial Sequence
  Cyclic GFR-binding peptide
DNGRVLLNSLQEVVKDYEDYYVMPLPE

SEQ ID NO: 125430 - protein, 27 aa, Artificial Sequence
  Cyclic GFR-binding peptide
DNGRVLLQYNKLVVKENEDLYLMSIAS

SEQ ID NO: 125431 - protein, 27 aa, Artificial Sequence
  Cyclic GFR-binding peptide
DNGRVLLEYQKYVVKENEDIFLMSIPS

SEQ ID NO: 125432 - protein, 27 aa, Artificial Sequence
  Cyclic GFR-binding peptide
DNGRVLLQYNKLVKPKRGVLYLISIAS

SEQ ID NO: 125433 - protein, 27 aa, Artificial Sequence
  Cyclic GFR-binding peptide
DNGRVLLRYKKLIVNSSDDFYLVSIAN

SEQ ID NO: 125434 - protein, 27 aa, Artificial Sequence
  Cyclic GFR-binding peptide
DNGRVLLNSLQEVVKENEDYYVMPLPE

SEQ ID NO: 125435 - protein, 27 aa, Artificial Sequence
  Cyclic GFR-binding peptide
DNGRVLLEYQKYVVKDYEDIFLMSIPS

SEQ ID NO: 125436 - protein, 27 aa, Artificial Sequence
  Cyclic GFR-binding peptide
DNGRVLLQYNKLVVNNASDLYLISIAS

SEQ ID NO: 125437 - protein, 27 aa, Artificial Sequence
  Cyclic GFR-binding peptide
DNGRVLLQYNKLIKPTKGILYLISIAS

SEQ ID NO: 125438 - protein, 27 aa, Artificial Sequence
  Cyclic GFR-binding peptide
DNGRVLLNSLQEIKPTKGIYYLITLPE

SEQ ID NO: 125439 - protein, 27 aa, Artificial Sequence
  Cyclic GFR-binding peptide
DNGRVLLEYQKYVKPKRGVIFLISIPS

SEQ ID NO: 125440 - protein, 27 aa, Artificial Sequence
  Cyclic GFR-binding peptide
DNGRVLLQYNKLVVKDYEDLYLMSIAS

SEQ ID NO: 125441 - protein, 27 aa, Artificial Sequence
  Cyclic GFR-binding peptide
DNGRVLLRYKKLVVNNASDFYLISIAN

SEQ ID NO: 125442 - protein, 27 aa, Artificial Sequence
  Cyclic GFR-binding peptide
DNGRVLLNSLQEIVNSSDDYYLVTLPE

SEQ ID NO: 125443 - protein, 27 aa, Artificial Sequence
  Cyclic GFR-binding peptide
DNGRVLLQYNKLIVNSSDDLYLVSIAS

SEQ ID NO: 125444 - protein, 27 aa, Artificial Sequence
  Cyclic GFR-binding peptide
NAISILYFIGKTPKILKKYRDNGRVLL

SEQ ID NO: 125445 - protein, 27 aa, Artificial Sequence
  Cyclic GFR-binding peptide
EPLTMLYYDEYDKVVEQLSNDNGRVLL

SEQ ID NO: 125446 - protein, 27 aa, Artificial Sequence
  Cyclic GFR-binding peptide
EPLPIVYYIGKTPKIEQLSNDNGRVLL

SEQ ID NO: 125447 - protein, 27 aa, Artificial Sequence
  Cyclic GFR-binding peptide
EPLTILYYVGRKPKVEQLSNDNGRVLL

SEQ ID NO: 125448 - protein, 27 aa, Artificial Sequence
  Cyclic GFR-binding peptide
EPLPIVYYVGRTPKVEQLSNDNGRVLL

SEQ ID NO: 125449 - protein, 27 aa, Artificial Sequence
  Cyclic GFR-binding peptide
NAISMLYFDEYDKVVLKKYRDNGRVLL

SEQ ID NO: 125450 - protein, 27 aa, Artificial Sequence
  Cyclic GFR-binding peptide
SPISVLFIDDSSNVIYKQYEDNGRVLL

SEQ ID NO: 125451 - protein, 27 aa, Artificial Sequence
  Cyclic GFR-binding peptide
SPISILFIVGRTPKVYKQYEDNGRVLL

SEQ ID NO: 125452 - protein, 27 aa, Artificial Sequence
  Cyclic GFR-binding peptide
EPLTMLYYDENEKVVEQLSNDNGRVLL

SEQ ID NO: 125453 - protein, 27 aa, Artificial Sequence
  Cyclic GFR-binding peptide
NAISILYFVGRTPKVLKKYRDNGRVLL

SEQ ID NO: 125454 - protein, 27 aa, Artificial Sequence
  Cyclic GFR-binding peptide
EPLTILYYDSANNVVEQLSNDNGRVLL

SEQ ID NO: 125455 - protein, 27 aa, Artificial Sequence
  Cyclic GFR-binding peptide
EPLPIVYYVGRKPKVEQLSNDNGRVLL

SEQ ID NO: 125456 - protein, 27 aa, Artificial Sequence
  Cyclic GFR-binding peptide
EPLPIVYYDSANNVVEQLSNDNGRVLL

SEQ ID NO: 125457 - protein, 27 aa, Artificial Sequence
  Cyclic GFR-binding peptide
EPLTILYYVGRTPKVEQLSNDNGRVLL

SEQ ID NO: 125458 - protein, 27 aa, Artificial Sequence
  Cyclic GFR-binding peptide
SAISILYLVGRTPKVLKNYQDNGRVLL

SEQ ID NO: 125459 - protein, 27 aa, Artificial Sequence
  Cyclic GFR-binding peptide
NAISMLYFDENEKVVLKKYRDNGRVLL

SEQ ID NO: 125460 - protein, 27 aa, Artificial Sequence
  Cyclic GFR-binding peptide
SPISILFIIGKTPKIYKQYEDNGRVLL

SEQ ID NO: 125461 - protein, 27 aa, Artificial Sequence
  Cyclic GFR-binding peptide
SPISILFIDSANNVVYKQYEDNGRVLL

SEQ ID NO: 125462 - protein, 27 aa, Artificial Sequence
  Cyclic GFR-binding peptide
NAISILYFVGRKPKVLKKYRDNGRVLL

SEQ ID NO: 125463 - protein, 27 aa, Artificial Sequence
  Cyclic GFR-binding peptide
EPLPVVYYDDSSNVIEQLSNDNGRVLL

SEQ ID NO: 125464 - protein, 27 aa, Artificial Sequence
  Cyclic GFR-binding peptide
EPLPMVYYDEYDKVVEQLSNDNGRVLL

SEQ ID NO: 125465 - protein, 27 aa, Artificial Sequence
  Cyclic GFR-binding peptide
SAISMLYLDENEKVVLKNYQDNGRVLL

SEQ ID NO: 125466 - protein, 27 aa, Artificial Sequence
  Cyclic GFR-binding peptide
SPISMLFIDENEKVVYKQYEDNGRVLL

SEQ ID NO: 125467 - protein, 27 aa, Artificial Sequence
  Cyclic GFR-binding peptide
SAISILYLVGRKPKVLKNYQDNGRVLL

SEQ ID NO: 125468 - protein, 27 aa, Artificial Sequence
  Cyclic GFR-binding peptide
NAISVLYFDDSSNVILKKYRDNGRVLL

SEQ ID NO: 125469 - protein, 27 aa, Artificial Sequence
  Cyclic GFR-binding peptide
EPLPMVYYDENEKVVEQLSNDNGRVLL

SEQ ID NO: 125470 - protein, 27 aa, Artificial Sequence
  Cyclic GFR-binding peptide
SPISMLFIDEYDKVVYKQYEDNGRVLL

SEQ ID NO: 125471 - protein, 27 aa, Artificial Sequence
  Cyclic GFR-binding peptide
SAISILYLDSANNVVLKNYQDNGRVLL

SEQ ID NO: 125472 - protein, 27 aa, Artificial Sequence
  Cyclic GFR-binding peptide
SAISILYLIGKTPKILKNYQDNGRVLL

SEQ ID NO: 125473 - protein, 27 aa, Artificial Sequence
  Cyclic GFR-binding peptide
EPLTILYYIGKTPKIEQLSNDNGRVLL

SEQ ID NO: 125474 - protein, 27 aa, Artificial Sequence
  Cyclic GFR-binding peptide
SPISILFIVGRKPKVYKQYEDNGRVLL

SEQ ID NO: 125475 - protein, 27 aa, Artificial Sequence
  Cyclic GFR-binding peptide
SAISMLYLDEYDKVVLKNYQDNGRVLL

SEQ ID NO: 125476 - protein, 27 aa, Artificial Sequence
  Cyclic GFR-binding peptide
NAISILYFDSANNVVLKKYRDNGRVLL

SEQ ID NO: 125477 - protein, 27 aa, Artificial Sequence
  Cyclic GFR-binding peptide
EPLTVLYYDDSSNVIEQLSNDNGRVLL

SEQ ID NO: 125478 - protein, 27 aa, Artificial Sequence
  Cyclic GFR-binding peptide
SAISVLYLDDSSNVILKNYQDNGRVLL

SEQ ID NO: 125479 - protein, 29 aa, Artificial Sequence
  Cyclic GFR-binding peptide
DNGRVLLVTAKKLKPKKRVYEIKRVQVPR

SEQ ID NO: 125480 - protein, 29 aa, Artificial Sequence
  Cyclic GFR-binding peptide
DNGRVLLVQVEKLKPKKRVYEVKAVKVSR

SEQ ID NO: 125481 - protein, 29 aa, Artificial Sequence
  Cyclic GFR-binding peptide
DNGRVLLVQVEKFIPKKRVIEVKAVKVSR

SEQ ID NO: 125482 - protein, 29 aa, Artificial Sequence
  Cyclic GFR-binding peptide
DNGRVLLVQVEKHQGQHPKIRVKAMKVSR

SEQ ID NO: 125483 - protein, 29 aa, Artificial Sequence
  Cyclic GFR-binding peptide
DNGRVLLVTAKKHQGQHPKIRIKRMQVPR

SEQ ID NO: 125484 - protein, 29 aa, Artificial Sequence
  Cyclic GFR-binding peptide
DNGRVLLSMEGLLKPKKRVYEMIQVTINS

SEQ ID NO: 125485 - protein, 29 aa, Artificial Sequence
  Cyclic GFR-binding peptide
DNGRVLLSMEGIFIPKKRVIEMIQVTINS

SEQ ID NO: 125486 - protein, 29 aa, Artificial Sequence
  Cyclic GFR-binding peptide
DNGRVLLSMEGLHQGQHPKIRMIQMTINS

SEQ ID NO: 125487 - protein, 29 aa, Artificial Sequence
  Cyclic GFR-binding peptide
DNGRVLLSMEGILKPKKRVYEMIQVTINS

SEQ ID NO: 125488 - protein, 29 aa, Artificial Sequence
  Cyclic GFR-binding peptide
DNGRVLLSMEGLFIPKKRVIEMIQVTINS

SEQ ID NO: 125489 - protein, 29 aa, Artificial Sequence
  Cyclic GFR-binding peptide
DNGRVLLVTAKKFIPKKRVIEIKRVQVPR

SEQ ID NO: 125490 - protein, 29 aa, Artificial Sequence
  Cyclic GFR-binding peptide
DNGRVLLSMEGIHQGQHPKIRMIQMTINS

SEQ ID NO: 125491 - protein, 29 aa, Artificial Sequence
  Cyclic GFR-binding peptide
RPVQVRKIEYVRKKPKLKKATVDNGRVLL

SEQ ID NO: 125492 - protein, 29 aa, Artificial Sequence
  Cyclic GFR-binding peptide
RSVKVAKVEYVRKKPKLKEVQVDNGRVLL

SEQ ID NO: 125493 - protein, 29 aa, Artificial Sequence
  Cyclic GFR-binding peptide
RSVKVAKVEIVRKKPIFKEVQVDNGRVLL

SEQ ID NO: 125494 - protein, 29 aa, Artificial Sequence
  Cyclic GFR-binding peptide
RSVKMAKVRIKPHQGQHKEVQVDNGRVLL

SEQ ID NO: 125495 - protein, 29 aa, Artificial Sequence
  Cyclic GFR-binding peptide
RPVQMRKIRIKPHQGQHKKATVDNGRVLL

SEQ ID NO: 125496 - protein, 29 aa, Artificial Sequence
  Cyclic GFR-binding peptide
SNITVQIMEYVRKKPKLLGEMSDNGRVLL

SEQ ID NO: 125497 - protein, 29 aa, Artificial Sequence
  Cyclic GFR-binding peptide
SNITVQIMEIVRKKPIFIGEMSDNGRVLL

SEQ ID NO: 125498 - protein, 29 aa, Artificial Sequence
  Cyclic GFR-binding peptide
SNITMQIMRIKPHQGQHLGEMSDNGRVLL

SEQ ID NO: 125499 - protein, 29 aa, Artificial Sequence
  Cyclic GFR-binding peptide
SNITVQIMEYVRKKPKLIGEMSDNGRVLL

SEQ ID NO: 125500 - protein, 29 aa, Artificial Sequence
  Cyclic GFR-binding peptide
SNITVQIMEIVRKKPIFLGEMSDNGRVLL

SEQ ID NO: 125501 - protein, 29 aa, Artificial Sequence
  Cyclic GFR-binding peptide
RPVQVRKIEIVRKKPIFKKATVDNGRVLL

SEQ ID NO: 125502 - protein, 29 aa, Artificial Sequence
  Cyclic GFR-binding peptide
SNITMQIMRIKPHQGQHIGEMSDNGRVLL

SEQ ID NO: 125503 - protein, 29 aa, Artificial Sequence
  Cyclic GFR-binding peptide
DNGRVLLVTAKKLKPKKRVYEIKRVQVPR

SEQ ID NO: 125504 - protein, 29 aa, Artificial Sequence
  Cyclic GFR-binding peptide
DNGRVLLVQVEKLKPKKRVYEVKAVKVSR

SEQ ID NO: 125505 - protein, 29 aa, Artificial Sequence
  Cyclic GFR-binding peptide
DNGRVLLVQVEKFIPKKRVIEVKAVKVSR

SEQ ID NO: 125506 - protein, 29 aa, Artificial Sequence
  Cyclic GFR-binding peptide
DNGRVLLVQVEKHQGQHPKIRVKAMKVSR

SEQ ID NO: 125507 - protein, 29 aa, Artificial Sequence
  Cyclic GFR-binding peptide
DNGRVLLVTAKKHQGQHPKIRIKRMQVPR

SEQ ID NO: 125508 - protein, 29 aa, Artificial Sequence
  Cyclic GFR-binding peptide
DNGRVLLSMEGLLKPKKRVYEMIQVTINS

SEQ ID NO: 125509 - protein, 29 aa, Artificial Sequence
  Cyclic GFR-binding peptide
DNGRVLLSMEGIFIPKKRVIEMIQVTINS

SEQ ID NO: 125510 - protein, 29 aa, Artificial Sequence
  Cyclic GFR-binding peptide
DNGRVLLSMEGLHQGQHPKIRMIQMTINS

SEQ ID NO: 125511 - protein, 29 aa, Artificial Sequence
  Cyclic GFR-binding peptide
DNGRVLLSMEGILKPKKRVYEMIQVTINS

SEQ ID NO: 125512 - protein, 29 aa, Artificial Sequence
  Cyclic GFR-binding peptide
DNGRVLLSMEGLFIPKKRVIEMIQVTINS

SEQ ID NO: 125513 - protein, 29 aa, Artificial Sequence
  Cyclic GFR-binding peptide
DNGRVLLVTAKKFIPKKRVIEIKRVQVPR

SEQ ID NO: 125514 - protein, 29 aa, Artificial Sequence
  Cyclic GFR-binding peptide
DNGRVLLSMEGIHQGQHPKIRMIQMTINS

SEQ ID NO: 125515 - protein, 29 aa, Artificial Sequence
  Cyclic GFR-binding peptide
RPVQVRKIEYVRKKPKLKKATVDNGRVLL

SEQ ID NO: 125516 - protein, 29 aa, Artificial Sequence
  Cyclic GFR-binding peptide
RSVKVAKVEYVRKKPKLKEVQVDNGRVLL

SEQ ID NO: 125517 - protein, 29 aa, Artificial Sequence
  Cyclic GFR-binding peptide
RSVKVAKVEIVRKKPIFKEVQVDNGRVLL

SEQ ID NO: 125518 - protein, 29 aa, Artificial Sequence
  Cyclic GFR-binding peptide
RSVKMAKVRIKPHQGQHKEVQVDNGRVLL

SEQ ID NO: 125519 - protein, 29 aa, Artificial Sequence
  Cyclic GFR-binding peptide
RPVQMRKIRIKPHQGQHKKATVDNGRVLL

SEQ ID NO: 125520 - protein, 29 aa, Artificial Sequence
  Cyclic GFR-binding peptide
SNITVQIMEYVRKKPKLLGEMSDNGRVLL

SEQ ID NO: 125521 - protein, 29 aa, Artificial Sequence
  Cyclic GFR-binding peptide
SNITVQIMEIVRKKPIFIGEMSDNGRVLL

SEQ ID NO: 125522 - protein, 29 aa, Artificial Sequence
  Cyclic GFR-binding peptide
SNITMQIMRIKPHQGQHLGEMSDNGRVLL

SEQ ID NO: 125523 - protein, 29 aa, Artificial Sequence
  Cyclic GFR-binding peptide
SNITVQIMEYVRKKPKLIGEMSDNGRVLL

SEQ ID NO: 125524 - protein, 29 aa, Artificial Sequence
  Cyclic GFR-binding peptide
SNITVQIMEIVRKKPIFLGEMSDNGRVLL

SEQ ID NO: 125525 - protein, 29 aa, Artificial Sequence
  Cyclic GFR-binding peptide
RPVQVRKIEIVRKKPIFKKATVDNGRVLL

SEQ ID NO: 125526 - protein, 29 aa, Artificial Sequence
  Cyclic GFR-binding peptide
SNITMQIMRIKPHQGQHIGEMSDNGRVLL

SEQ ID NO: 125527 - protein, 27 aa, Artificial Sequence
  Cyclic GFR-binding peptide
DNGRVLLEYQKYVVKENEDIYLMSIPS

SEQ ID NO: 125528 - protein, 27 aa, Artificial Sequence
  Cyclic GFR-binding peptide
DNGRVLLRYKKLIKPTKGIFYLISIAN

SEQ ID NO: 125529 - protein, 27 aa, Artificial Sequence
  Cyclic GFR-binding peptide
DNGRVLLEYKFKVKPTRGVLYLISIPE

SEQ ID NO: 125530 - protein, 27 aa, Artificial Sequence
  Cyclic GFR-binding peptide
DNGRVLLYHYKLVVKDYEDKYLMSIPS

SEQ ID NO: 125531 - protein, 27 aa, Artificial Sequence
  Cyclic GFR-binding peptide
DNGRVLLEYKFKTPVGMDDLYLVSIPE

SEQ ID NO: 125532 - protein, 27 aa, Artificial Sequence
  Cyclic GFR-binding peptide
DNGRVLLEYQKYVKPKRGVIYLISIPS

SEQ ID NO: 125533 - protein, 27 aa, Artificial Sequence
  Cyclic GFR-binding peptide
DNGRVLLRYKKLVVKDYEDFYLMSIAN

SEQ ID NO: 125534 - protein, 27 aa, Artificial Sequence
  Cyclic GFR-binding peptide
DNGRVLLEYQKYVVKDYEDIYLMSIPS

SEQ ID NO: 125535 - protein, 27 aa, Artificial Sequence
  Cyclic GFR-binding peptide
DNGRVLLRYKKLVKPTRGVFYLISIAN

SEQ ID NO: 125536 - protein, 27 aa, Artificial Sequence
  Cyclic GFR-binding peptide
DNGRVLLYHYKLIKPTKGIKYLISIPS

SEQ ID NO: 125537 - protein, 27 aa, Artificial Sequence
  Cyclic GFR-binding peptide
DNGRVLLYHYKLVVKENEDKYLMSIPS

SEQ ID NO: 125538 - protein, 27 aa, Artificial Sequence
  Cyclic GFR-binding peptide
DNGRVLLYHYKLVKPKRGVKYLISIPS

SEQ ID NO: 125539 - protein, 27 aa, Artificial Sequence
  Cyclic GFR-binding peptide
DNGRVLLEYKFKIKPTKGILYLISIPE

SEQ ID NO: 125540 - protein, 27 aa, Artificial Sequence
  Cyclic GFR-binding peptide
DNGRVLLEYQKYIKPTKGIIYLISIPS

SEQ ID NO: 125541 - protein, 27 aa, Artificial Sequence
  Cyclic GFR-binding peptide
DNGRVLLRYKKLVVKENEDFYLMSIAN

SEQ ID NO: 125542 - protein, 27 aa, Artificial Sequence
  Cyclic GFR-binding peptide
DNGRVLLRYKKLVVNNAADFYLISIAN

SEQ ID NO: 125543 - protein, 27 aa, Artificial Sequence
  Cyclic GFR-binding peptide
DNGRVLLYHYKLYTVVGKDKYLISIPS

SEQ ID NO: 125544 - protein, 27 aa, Artificial Sequence
  Cyclic GFR-binding peptide
DNGRVLLRYKKLTPVGMDDFYLVSIAN

SEQ ID NO: 125545 - protein, 27 aa, Artificial Sequence
  Cyclic GFR-binding peptide
DNGRVLLRYKKLVKPKRGVFYLISIAN

SEQ ID NO: 125546 - protein, 27 aa, Artificial Sequence
  Cyclic GFR-binding peptide
DNGRVLLYHYKLVVNNAADKYLISIPS

SEQ ID NO: 125547 - protein, 27 aa, Artificial Sequence
  Cyclic GFR-binding peptide
DNGRVLLYHYKLIVNSSDDKYLVSIPS

SEQ ID NO: 125548 - protein, 27 aa, Artificial Sequence
  Cyclic GFR-binding peptide
DNGRVLLRYKKLIVNNSSDFYLVSIAN

SEQ ID NO: 125549 - protein, 27 aa, Artificial Sequence
  Cyclic GFR-binding peptide
DNGRVLLRYKKLYTVVGKDFYLISIAN

SEQ ID NO: 125550 - protein, 27 aa, Artificial Sequence
  Cyclic GFR-binding peptide
DNGRVLLEYQKYVVNNAADIYLISIPS

SEQ ID NO: 125551 - protein, 27 aa, Artificial Sequence
  Cyclic GFR-binding peptide
DNGRVLLRYKKLIVNSSDDFYLVSIAN

SEQ ID NO: 125552 - protein, 27 aa, Artificial Sequence
  Cyclic GFR-binding peptide
DNGRVLLEYKFKIVNNSSDLYLVSIPE

SEQ ID NO: 125553 - protein, 27 aa, Artificial Sequence
  Cyclic GFR-binding peptide
DNGRVLLEYQKYVKPTRGVIYLISIPS

SEQ ID NO: 125554 - protein, 27 aa, Artificial Sequence
  Cyclic GFR-binding peptide
DNGRVLLEYQKYIVNSSDDIYLVSIPS

SEQ ID NO: 125555 - protein, 27 aa, Artificial Sequence
  Cyclic GFR-binding peptide
DNGRVLLYHYKLTPVGMDDKYLVSIPS

SEQ ID NO: 125556 - protein, 27 aa, Artificial Sequence
  Cyclic GFR-binding peptide
DNGRVLLYHYKLIVNNSSDKYLVSIPS

SEQ ID NO: 125557 - protein, 27 aa, Artificial Sequence
  Cyclic GFR-binding peptide
DNGRVLLEYKFKIVNSSDDLYLVSIPE

SEQ ID NO: 125558 - protein, 27 aa, Artificial Sequence
  Cyclic GFR-binding peptide
DNGRVLLYHYKLVKPTRGVKYLISIPS

SEQ ID NO: 125559 - protein, 27 aa, Artificial Sequence
  Cyclic GFR-binding peptide
DNGRVLLEYKFKVKPKRGVLYLISIPE

SEQ ID NO: 125560 - protein, 27 aa, Artificial Sequence
  Cyclic GFR-binding peptide
DNGRVLLEYQKYYTVVGKDIYLISIPS

SEQ ID NO: 125561 - protein, 27 aa, Artificial Sequence
  Cyclic GFR-binding peptide
DNGRVLLEYKFKVVKENEDLYLMSIPE

SEQ ID NO: 125562 - protein, 27 aa, Artificial Sequence
  Cyclic GFR-binding peptide
DNGRVLLEYQKYTPVGMDDIYLVSIPS

SEQ ID NO: 125563 - protein, 27 aa, Artificial Sequence
  Cyclic GFR-binding peptide
DNGRVLLEYQKYIVNNSSDIYLVSIPS

SEQ ID NO: 125564 - protein, 27 aa, Artificial Sequence
  Cyclic GFR-binding peptide
DNGRVLLEYKFKVVKDYEDLYLMSIPE

SEQ ID NO: 125565 - protein, 27 aa, Artificial Sequence
  Cyclic GFR-binding peptide
DNGRVLLEYKFKYTVVGKDLYLISIPE

SEQ ID NO: 125566 - protein, 27 aa, Artificial Sequence
  Cyclic GFR-binding peptide
DNGRVLLEYKFKVVNNAADLYLISIPE

SEQ ID NO: 125567 - protein, 27 aa, Artificial Sequence
  Cyclic GFR-binding peptide
SPISMLYIDENEKVVYKQYEDNGRVLL

SEQ ID NO: 125568 - protein, 27 aa, Artificial Sequence
  Cyclic GFR-binding peptide
NAISILYFIGKTPKILKKYRDNGRVLL

SEQ ID NO: 125569 - protein, 27 aa, Artificial Sequence
  Cyclic GFR-binding peptide
EPISILYLVGRTPKVKFKYEDNGRVLL

SEQ ID NO: 125570 - protein, 27 aa, Artificial Sequence
  Cyclic GFR-binding peptide
SPISMLYKDEYDKVVLKYHYDNGRVLL

SEQ ID NO: 125571 - protein, 27 aa, Artificial Sequence
  Cyclic GFR-binding peptide
EPISVLYLDDMGVPTKFKYEDNGRVLL

SEQ ID NO: 125572 - protein, 27 aa, Artificial Sequence
  Cyclic GFR-binding peptide
SPISILYIVGRKPKVYKQYEDNGRVLL

SEQ ID NO: 125573 - protein, 27 aa, Artificial Sequence
  Cyclic GFR-binding peptide
NAISMLYFDEYDKVVLKKYRDNGRVLL

SEQ ID NO: 125574 - protein, 27 aa, Artificial Sequence
  Cyclic GFR-binding peptide
SPISMLYIDEYDKVVYKQYEDNGRVLL

SEQ ID NO: 125575 - protein, 27 aa, Artificial Sequence
  Cyclic GFR-binding peptide
NAISILYFVGRTPKVLKKYRDNGRVLL

SEQ ID NO: 125576 - protein, 27 aa, Artificial Sequence
  Cyclic GFR-binding peptide
SPISILYKIGKTPKILKYHYDNGRVLL

SEQ ID NO: 125577 - protein, 27 aa, Artificial Sequence
  Cyclic GFR-binding peptide
SPISMLYKDENEKVVLKYHYDNGRVLL

SEQ ID NO: 125578 - protein, 27 aa, Artificial Sequence
  Cyclic GFR-binding peptide
SPISILYKVGRKPKVLKYHYDNGRVLL

SEQ ID NO: 125579 - protein, 27 aa, Artificial Sequence
  Cyclic GFR-binding peptide
EPISILYLIGKTPKIKFKYEDNGRVLL

SEQ ID NO: 125580 - protein, 27 aa, Artificial Sequence
  Cyclic GFR-binding peptide
SPISILYIIGKTPKIYKQYEDNGRVLL

SEQ ID NO: 125581 - protein, 27 aa, Artificial Sequence
  Cyclic GFR-binding peptide
NAISMLYFDENEKVVLKKYRDNGRVLL

SEQ ID NO: 125582 - protein, 27 aa, Artificial Sequence
  Cyclic GFR-binding peptide
NAISILYFDAANNVVLKKYRDNGRVLL

SEQ ID NO: 125583 - protein, 27 aa, Artificial Sequence
  Cyclic GFR-binding peptide
SPISILYKDKGVVTYLKYHYDNGRVLL

SEQ ID NO: 125584 - protein, 27 aa, Artificial Sequence
  Cyclic GFR-binding peptide
NAISVLYFDDMGVPTLKKYRDNGRVLL

SEQ ID NO: 125585 - protein, 27 aa, Artificial Sequence
  Cyclic GFR-binding peptide
NAISILYFVGRKPKVLKKYRDNGRVLL

SEQ ID NO: 125586 - protein, 27 aa, Artificial Sequence
  Cyclic GFR-binding peptide
SPISILYKDAANNVVLKYHYDNGRVLL

SEQ ID NO: 125587 - protein, 27 aa, Artificial Sequence
  Cyclic GFR-binding peptide
SPISVLYKDDSSNVILKYHYDNGRVLL

SEQ ID NO: 125588 - protein, 27 aa, Artificial Sequence
  Cyclic GFR-binding peptide
NAISVLYFDSSNNVILKKYRDNGRVLL

SEQ ID NO: 125589 - protein, 27 aa, Artificial Sequence
  Cyclic GFR-binding peptide
NAISILYFDKGVVTYLKKYRDNGRVLL

SEQ ID NO: 125590 - protein, 27 aa, Artificial Sequence
  Cyclic GFR-binding peptide
SPISILYIDAANNVVYKQYEDNGRVLL

SEQ ID NO: 125591 - protein, 27 aa, Artificial Sequence
  Cyclic GFR-binding peptide
NAISVLYFDDSSNVILKKYRDNGRVLL

SEQ ID NO: 125592 - protein, 27 aa, Artificial Sequence
  Cyclic GFR-binding peptide
EPISVLYLDSSNNVIKFKYEDNGRVLL

SEQ ID NO: 125593 - protein, 27 aa, Artificial Sequence
  Cyclic GFR-binding peptide
SPISILYIVGRTPKVYKQYEDNGRVLL

SEQ ID NO: 125594 - protein, 27 aa, Artificial Sequence
  Cyclic GFR-binding peptide
SPISVLYIDDSSNVIYKQYEDNGRVLL

SEQ ID NO: 125595 - protein, 27 aa, Artificial Sequence
  Cyclic GFR-binding peptide
SPISVLYKDDMGVPTLKYHYDNGRVLL

SEQ ID NO: 125596 - protein, 27 aa, Artificial Sequence
  Cyclic GFR-binding peptide
SPISVLYKDSSNNVILKYHYDNGRVLL

SEQ ID NO: 125597 - protein, 27 aa, Artificial Sequence
  Cyclic GFR-binding peptide
EPISVLYLDDSSNVIKFKYEDNGRVLL

SEQ ID NO: 125598 - protein, 27 aa, Artificial Sequence
  Cyclic GFR-binding peptide
SPISILYKVGRTPKVLKYHYDNGRVLL

SEQ ID NO: 125599 - protein, 27 aa, Artificial Sequence
  Cyclic GFR-binding peptide
EPISILYLVGRKPKVKFKYEDNGRVLL

SEQ ID NO: 125600 - protein, 27 aa, Artificial Sequence
  Cyclic GFR-binding peptide
SPISILYIDKGVVTYYKQYEDNGRVLL

SEQ ID NO: 125601 - protein, 27 aa, Artificial Sequence
  Cyclic GFR-binding peptide
EPISMLYLDENEKVVKFKYEDNGRVLL

SEQ ID NO: 125602 - protein, 27 aa, Artificial Sequence
  Cyclic GFR-binding peptide
SPISVLYIDDMGVPTYKQYEDNGRVLL

SEQ ID NO: 125603 - protein, 27 aa, Artificial Sequence
  Cyclic GFR-binding peptide
SPISVLYIDSSNNVIYKQYEDNGRVLL

SEQ ID NO: 125604 - protein, 27 aa, Artificial Sequence
  Cyclic GFR-binding peptide
EPISMLYLDEYDKVVKFKYEDNGRVLL

SEQ ID NO: 125605 - protein, 27 aa, Artificial Sequence
  Cyclic GFR-binding peptide
EPISILYLDKGVVTYKFKYEDNGRVLL

SEQ ID NO: 125606 - protein, 27 aa, Artificial Sequence
  Cyclic GFR-binding peptide
EPISILYLDAANNVVKFKYEDNGRVLL

SEQ ID NO: 125607 - protein, 27 aa, Artificial Sequence
  Cyclic GFR-binding peptide
DNGRVLLPIKGYIIQQKDNFYLMNIPS

SEQ ID NO: 125608 - protein, 27 aa, Artificial Sequence
  Cyclic GFR-binding peptide
DNGRVLLPIKGYVVKDYEDFYLMNIPS

SEQ ID NO: 125609 - protein, 27 aa, Artificial Sequence
  Cyclic GFR-binding peptide
DNGRVLLPIKGYIVNSSDDFYLVNIPS

SEQ ID NO: 125610 - protein, 27 aa, Artificial Sequence
  Cyclic GFR-binding peptide
DNGRVLLPIKGYLLVRGNDFYLMNIPS

SEQ ID NO: 125611 - protein, 27 aa, Artificial Sequence
  Cyclic GFR-binding peptide
DNGRVLLPIKGYVVNNAADFYLINIPS

SEQ ID NO: 125612 - protein, 27 aa, Artificial Sequence
  Cyclic GFR-binding peptide
DNGRVLLPIKGYVVKENEDFYLMNIPS

SEQ ID NO: 125613 - protein, 27 aa, Artificial Sequence
  Cyclic GFR-binding peptide
DNGRVLLPIKGYVVNNASDFYLINIPS

SEQ ID NO: 125614 - protein, 27 aa, Artificial Sequence
  Cyclic GFR-binding peptide
DNGRVLLPIKGYYTVVGKDFYLINIPS

SEQ ID NO: 125615 - protein, 27 aa, Artificial Sequence
  Cyclic GFR-binding peptide
DNGRVLLPIKGYTPVGMDDFYLVNIPS

SEQ ID NO: 125616 - protein, 27 aa, Artificial Sequence
  Cyclic GFR-binding peptide
DNGRVLLPIKGYIVNNSSDFYLVNIPS

SEQ ID NO: 125617 - protein, 27 aa, Artificial Sequence
  Cyclic GFR-binding peptide
SPINMLYFNDKQQIIYGKIPDNGRVLL

SEQ ID NO: 125618 - protein, 27 aa, Artificial Sequence
  Cyclic GFR-binding peptide
SPINMLYFDEYDKVVYGKIPDNGRVLL

SEQ ID NO: 125619 - protein, 27 aa, Artificial Sequence
  Cyclic GFR-binding peptide
SPINVLYFDDSSNVIYGKIPDNGRVLL

SEQ ID NO: 125620 - protein, 27 aa, Artificial Sequence
  Cyclic GFR-binding peptide
SPINMLYFDNGRVLLYGKIPDNGRVLL

SEQ ID NO: 125621 - protein, 27 aa, Artificial Sequence
  Cyclic GFR-binding peptide
SPINILYFDAANNVVYGKIPDNGRVLL

SEQ ID NO: 125622 - protein, 27 aa, Artificial Sequence
  Cyclic GFR-binding peptide
SPINMLYFDENEKVVYGKIPDNGRVLL

SEQ ID NO: 125623 - protein, 27 aa, Artificial Sequence
  Cyclic GFR-binding peptide
SPINILYFDSANNVVYGKIPDNGRVLL

SEQ ID NO: 125624 - protein, 27 aa, Artificial Sequence
  Cyclic GFR-binding peptide
SPINILYFDKGVVTYYGKIPDNGRVLL

SEQ ID NO: 125625 - protein, 27 aa, Artificial Sequence
  Cyclic GFR-binding peptide
SPINVLYFDDMGVPTYGKIPDNGRVLL

SEQ ID NO: 125626 - protein, 27 aa, Artificial Sequence
  Cyclic GFR-binding peptide
SPINVLYFDSSNNVIYGKIPDNGRVLL

SEQ ID NO: 125627 - protein, 27 aa, Artificial Sequence
  Cyclic GFR-binding peptide
DNGRVLLPIKGYIIQQKDNFYLMNIPS

SEQ ID NO: 125628 - protein, 27 aa, Artificial Sequence
  Cyclic GFR-binding peptide
DNGRVLLPIKGYVVKDYEDFYLMNIPS

SEQ ID NO: 125629 - protein, 27 aa, Artificial Sequence
  Cyclic GFR-binding peptide
DNGRVLLPIKGYIVNSSDDFYLVNIPS

SEQ ID NO: 125630 - protein, 27 aa, Artificial Sequence
  Cyclic GFR-binding peptide
DNGRVLLPIKGYLLVRGNDFYLMNIPS

SEQ ID NO: 125631 - protein, 27 aa, Artificial Sequence
  Cyclic GFR-binding peptide
DNGRVLLPIKGYVVNNAADFYLINIPS

SEQ ID NO: 125632 - protein, 27 aa, Artificial Sequence
  Cyclic GFR-binding peptide
DNGRVLLPIKGYVVKENEDFYLMNIPS

SEQ ID NO: 125633 - protein, 27 aa, Artificial Sequence
  Cyclic GFR-binding peptide
DNGRVLLPIKGYVVNNASDFYLINIPS

SEQ ID NO: 125634 - protein, 27 aa, Artificial Sequence
  Cyclic GFR-binding peptide
DNGRVLLPIKGYYTVVGKDFYLINIPS

SEQ ID NO: 125635 - protein, 27 aa, Artificial Sequence
  Cyclic GFR-binding peptide
DNGRVLLPIKGYTPVGMDDFYLVNIPS

SEQ ID NO: 125636 - protein, 27 aa, Artificial Sequence
  Cyclic GFR-binding peptide
DNGRVLLPIKGYIVNNSSDFYLVNIPS

SEQ ID NO: 125637 - protein, 27 aa, Artificial Sequence
  Cyclic GFR-binding peptide
SPINMLYFNDKQQIIYGKIPDNGRVLL

SEQ ID NO: 125638 - protein, 27 aa, Artificial Sequence
  Cyclic GFR-binding peptide
SPINMLYFDEYDKVVYGKIPDNGRVLL

SEQ ID NO: 125639 - protein, 27 aa, Artificial Sequence
  Cyclic GFR-binding peptide
SPINVLYFDDSSNVIYGKIPDNGRVLL

SEQ ID NO: 125640 - protein, 27 aa, Artificial Sequence
  Cyclic GFR-binding peptide
SPINMLYFDNGRVLLYGKIPDNGRVLL

SEQ ID NO: 125641 - protein, 27 aa, Artificial Sequence
  Cyclic GFR-binding peptide
SPINILYFDAANNVVYGKIPDNGRVLL

SEQ ID NO: 125642 - protein, 27 aa, Artificial Sequence
  Cyclic GFR-binding peptide
SPINMLYFDENEKVVYGKIPDNGRVLL

SEQ ID NO: 125643 - protein, 27 aa, Artificial Sequence
  Cyclic GFR-binding peptide
SPINILYFDSANNVVYGKIPDNGRVLL

SEQ ID NO: 125644 - protein, 27 aa, Artificial Sequence
  Cyclic GFR-binding peptide
SPINILYFDKGVVTYYGKIPDNGRVLL

SEQ ID NO: 125645 - protein, 27 aa, Artificial Sequence
  Cyclic GFR-binding peptide
SPINVLYFDDMGVPTYGKIPDNGRVLL

SEQ ID NO: 125646 - protein, 27 aa, Artificial Sequence
  Cyclic GFR-binding peptide
SPINVLYFDSSNNVIYGKIPDNGRVLL

SEQ ID NO: 125647 - protein, 27 aa, Artificial Sequence
  Cyclic GFR-binding peptide
DNGRVLLRYKKLIKPTKGIFYLISIAN

SEQ ID NO: 125648 - protein, 27 aa, Artificial Sequence
  Cyclic GFR-binding peptide
DNGRVLLRYKKLVVKDYEDFYLMSIAN

SEQ ID NO: 125649 - protein, 27 aa, Artificial Sequence
  Cyclic GFR-binding peptide
DNGRVLLRYKKLVKPTRGVFYLISIAN

SEQ ID NO: 125650 - protein, 27 aa, Artificial Sequence
  Cyclic GFR-binding peptide
DNGRVLLRYKKLVVKENEDFYLMSIAN

SEQ ID NO: 125651 - protein, 27 aa, Artificial Sequence
  Cyclic GFR-binding peptide
DNGRVLLRYKKLVKPKRGVFYLISIAN

SEQ ID NO: 125652 - protein, 27 aa, Artificial Sequence
  Cyclic GFR-binding peptide
DNGRVLLRYKKLIVNSSDDFYLVSIAN

SEQ ID NO: 125653 - protein, 27 aa, Artificial Sequence
  Cyclic GFR-binding peptide
DNGRVLLRYKKLVVNNASDFYLISIAN

SEQ ID NO: 125654 - protein, 27 aa, Artificial Sequence
  Cyclic GFR-binding peptide
NAISILYFIGKTPKILKKYRDNGRVLL

SEQ ID NO: 125655 - protein, 27 aa, Artificial Sequence
  Cyclic GFR-binding peptide
NAISMLYFDEYDKVVLKKYRDNGRVLL

SEQ ID NO: 125656 - protein, 27 aa, Artificial Sequence
  Cyclic GFR-binding peptide
NAISILYFVGRTPKVLKKYRDNGRVLL

SEQ ID NO: 125657 - protein, 27 aa, Artificial Sequence
  Cyclic GFR-binding peptide
NAISMLYFDENEKVVLKKYRDNGRVLL

SEQ ID NO: 125658 - protein, 27 aa, Artificial Sequence
  Cyclic GFR-binding peptide
NAISILYFVGRKPKVLKKYRDNGRVLL

SEQ ID NO: 125659 - protein, 27 aa, Artificial Sequence
  Cyclic GFR-binding peptide
NAISVLYFDDSSNVILKKYRDNGRVLL

SEQ ID NO: 125660 - protein, 27 aa, Artificial Sequence
  Cyclic GFR-binding peptide
NAISILYFDSANNVVLKKYRDNGRVLL

SEQ ID NO: 125661 - protein, 27 aa, Artificial Sequence
  Cyclic GFR-binding peptide
DNGRVLLEYQKYVVKENEDIYLMSIPS

SEQ ID NO: 125662 - protein, 27 aa, Artificial Sequence
  Cyclic GFR-binding peptide
DNGRVLLNSLQEVVKDYEDYYLMTLPE

SEQ ID NO: 125663 - protein, 27 aa, Artificial Sequence
  Cyclic GFR-binding peptide
DNGRVLLEYQKYVVKENEDIFLMSIPS

SEQ ID NO: 125664 - protein, 27 aa, Artificial Sequence
  Cyclic GFR-binding peptide
DNGRVLLNSLQEIKPTKGIYYVIPLPE

SEQ ID NO: 125665 - protein, 27 aa, Artificial Sequence
  Cyclic GFR-binding peptide
DNGRVLLNSLQEVKPKRGVYYLITLPE

SEQ ID NO: 125666 - protein, 27 aa, Artificial Sequence
  Cyclic GFR-binding peptide
DNGRVLLEYQKYVVNNAADIYLISIPS

SEQ ID NO: 125667 - protein, 27 aa, Artificial Sequence
  Cyclic GFR-binding peptide
DNGRVLLNSLQEVKPTRGVYYVIPLPE

SEQ ID NO: 125668 - protein, 27 aa, Artificial Sequence
  Cyclic GFR-binding peptide
DNGRVLLEYQKYIVNSSDDIFLVSIPS

SEQ ID NO: 125669 - protein, 27 aa, Artificial Sequence
  Cyclic GFR-binding peptide
DNGRVLLEYQKYVKPTRGVIFLISIPS

SEQ ID NO: 125670 - protein, 27 aa, Artificial Sequence
  Cyclic GFR-binding peptide
DNGRVLLEYQKYVVKDYEDIYLMSIPS

SEQ ID NO: 125671 - protein, 27 aa, Artificial Sequence
  Cyclic GFR-binding peptide
DNGRVLLNSLQEVVKENEDYYLMTLPE

SEQ ID NO: 125672 - protein, 27 aa, Artificial Sequence
  Cyclic GFR-binding peptide
DNGRVLLNSLQEVVNNASDYYLITLPE

SEQ ID NO: 125673 - protein, 27 aa, Artificial Sequence
  Cyclic GFR-binding peptide
DNGRVLLNSLQEVKPKRGVYYVIPLPE

SEQ ID NO: 125674 - protein, 27 aa, Artificial Sequence
  Cyclic GFR-binding peptide
DNGRVLLEYQKYIVNSSDDIYLVSIPS

SEQ ID NO: 125675 - protein, 27 aa, Artificial Sequence
  Cyclic GFR-binding peptide
DNGRVLLNSLQEVVKENEDYYVMPLPE

SEQ ID NO: 125676 - protein, 27 aa, Artificial Sequence
  Cyclic GFR-binding peptide
DNGRVLLEYQKYVVKDYEDIFLMSIPS

SEQ ID NO: 125677 - protein, 27 aa, Artificial Sequence
  Cyclic GFR-binding peptide
DNGRVLLNSLQEVVNNASDYYVIPLPE

SEQ ID NO: 125678 - protein, 27 aa, Artificial Sequence
  Cyclic GFR-binding peptide
DNGRVLLEYQKYVVNNASDIYLISIPS

SEQ ID NO: 125679 - protein, 27 aa, Artificial Sequence
  Cyclic GFR-binding peptide
DNGRVLLNSLQEVKPTRGVYYLITLPE

SEQ ID NO: 125680 - protein, 27 aa, Artificial Sequence
  Cyclic GFR-binding peptide
DNGRVLLEYQKYYTVVGKDIYLISIPS

SEQ ID NO: 125681 - protein, 27 aa, Artificial Sequence
  Cyclic GFR-binding peptide
DNGRVLLEYQKYIIQQKDNIYLMSIPS

SEQ ID NO: 125682 - protein, 27 aa, Artificial Sequence
  Cyclic GFR-binding peptide
DNGRVLLEYQKYTPVGMDDIYLVSIPS

SEQ ID NO: 125683 - protein, 27 aa, Artificial Sequence
  Cyclic GFR-binding peptide
DNGRVLLEYQKYIKPTKGIIFLISIPS

SEQ ID NO: 125684 - protein, 27 aa, Artificial Sequence
  Cyclic GFR-binding peptide
DNGRVLLEYQKYIVNNSSDIYLVSIPS

SEQ ID NO: 125685 - protein, 27 aa, Artificial Sequence
  Cyclic GFR-binding peptide
DNGRVLLNSLQEIKPTKGIYYLITLPE

SEQ ID NO: 125686 - protein, 27 aa, Artificial Sequence
  Cyclic GFR-binding peptide
DNGRVLLEYQKYVVNNASDIFLISIPS

SEQ ID NO: 125687 - protein, 27 aa, Artificial Sequence
  Cyclic GFR-binding peptide
DNGRVLLEYQKYVKPKRGVIFLISIPS

SEQ ID NO: 125688 - protein, 27 aa, Artificial Sequence
  Cyclic GFR-binding peptide
DNGRVLLNSLQEIVNSSDDYYVVPLPE

SEQ ID NO: 125689 - protein, 27 aa, Artificial Sequence
  Cyclic GFR-binding peptide
DNGRVLLNSLQEVVKDYEDYYVMPLPE

SEQ ID NO: 125690 - protein, 27 aa, Artificial Sequence
  Cyclic GFR-binding peptide
DNGRVLLEYQKYLLVRGNDIYLMSIPS

SEQ ID NO: 125691 - protein, 27 aa, Artificial Sequence
  Cyclic GFR-binding peptide
DNGRVLLNSLQEIVNSSDDYYLVTLPE

SEQ ID NO: 125692 - protein, 27 aa, Artificial Sequence
  Cyclic GFR-binding peptide
SPISMLYIDENEKVVYKQYEDNGRVLL

SEQ ID NO: 125693 - protein, 27 aa, Artificial Sequence
  Cyclic GFR-binding peptide
EPLTMLYYDEYDKVVEQLSNDNGRVLL

SEQ ID NO: 125694 - protein, 27 aa, Artificial Sequence
  Cyclic GFR-binding peptide
SPISMLFIDENEKVVYKQYEDNGRVLL

SEQ ID NO: 125695 - protein, 27 aa, Artificial Sequence
  Cyclic GFR-binding peptide
EPLPIVYYIGKTPKIEQLSNDNGRVLL

SEQ ID NO: 125696 - protein, 27 aa, Artificial Sequence
  Cyclic GFR-binding peptide
EPLTILYYVGRKPKVEQLSNDNGRVLL

SEQ ID NO: 125697 - protein, 27 aa, Artificial Sequence
  Cyclic GFR-binding peptide
SPISILYIDAANNVVYKQYEDNGRVLL

SEQ ID NO: 125698 - protein, 27 aa, Artificial Sequence
  Cyclic GFR-binding peptide
EPLPIVYYVGRTPKVEQLSNDNGRVLL

SEQ ID NO: 125699 - protein, 27 aa, Artificial Sequence
  Cyclic GFR-binding peptide
SPISVLFIDDSSNVIYKQYEDNGRVLL

SEQ ID NO: 125700 - protein, 27 aa, Artificial Sequence
  Cyclic GFR-binding peptide
SPISILFIVGRTPKVYKQYEDNGRVLL

SEQ ID NO: 125701 - protein, 27 aa, Artificial Sequence
  Cyclic GFR-binding peptide
SPISMLYIDEYDKVVYKQYEDNGRVLL

SEQ ID NO: 125702 - protein, 27 aa, Artificial Sequence
  Cyclic GFR-binding peptide
EPLTMLYYDENEKVVEQLSNDNGRVLL

SEQ ID NO: 125703 - protein, 27 aa, Artificial Sequence
  Cyclic GFR-binding peptide
EPLTILYYDSANNVVEQLSNDNGRVLL

SEQ ID NO: 125704 - protein, 27 aa, Artificial Sequence
  Cyclic GFR-binding peptide
EPLPIVYYVGRKPKVEQLSNDNGRVLL

SEQ ID NO: 125705 - protein, 27 aa, Artificial Sequence
  Cyclic GFR-binding peptide
SPISVLYIDDSSNVIYKQYEDNGRVLL

SEQ ID NO: 125706 - protein, 27 aa, Artificial Sequence
  Cyclic GFR-binding peptide
EPLPMVYYDENEKVVEQLSNDNGRVLL

SEQ ID NO: 125707 - protein, 27 aa, Artificial Sequence
  Cyclic GFR-binding peptide
SPISMLFIDEYDKVVYKQYEDNGRVLL

SEQ ID NO: 125708 - protein, 27 aa, Artificial Sequence
  Cyclic GFR-binding peptide
EPLPIVYYDSANNVVEQLSNDNGRVLL

SEQ ID NO: 125709 - protein, 27 aa, Artificial Sequence
  Cyclic GFR-binding peptide
SPISILYIDSANNVVYKQYEDNGRVLL

SEQ ID NO: 125710 - protein, 27 aa, Artificial Sequence
  Cyclic GFR-binding peptide
EPLTILYYVGRTPKVEQLSNDNGRVLL

SEQ ID NO: 125711 - protein, 27 aa, Artificial Sequence
  Cyclic GFR-binding peptide
SPISILYIDKGVVTYYKQYEDNGRVLL

SEQ ID NO: 125712 - protein, 27 aa, Artificial Sequence
  Cyclic GFR-binding peptide
SPISMLYINDKQQIIYKQYEDNGRVLL

SEQ ID NO: 125713 - protein, 27 aa, Artificial Sequence
  Cyclic GFR-binding peptide
SPISVLYIDDMGVPTYKQYEDNGRVLL

SEQ ID NO: 125714 - protein, 27 aa, Artificial Sequence
  Cyclic GFR-binding peptide
SPISILFIIGKTPKIYKQYEDNGRVLL

SEQ ID NO: 125715 - protein, 27 aa, Artificial Sequence
  Cyclic GFR-binding peptide
SPISVLYIDSSNNVIYKQYEDNGRVLL

SEQ ID NO: 125716 - protein, 27 aa, Artificial Sequence
  Cyclic GFR-binding peptide
EPLTILYYIGKTPKIEQLSNDNGRVLL

SEQ ID NO: 125717 - protein, 27 aa, Artificial Sequence
  Cyclic GFR-binding peptide
SPISILFIDSANNVVYKQYEDNGRVLL

SEQ ID NO: 125718 - protein, 27 aa, Artificial Sequence
  Cyclic GFR-binding peptide
SPISILFIVGRKPKVYKQYEDNGRVLL

SEQ ID NO: 125719 - protein, 27 aa, Artificial Sequence
  Cyclic GFR-binding peptide
EPLPVVYYDDSSNVIEQLSNDNGRVLL

SEQ ID NO: 125720 - protein, 27 aa, Artificial Sequence
  Cyclic GFR-binding peptide
EPLPMVYYDEYDKVVEQLSNDNGRVLL

SEQ ID NO: 125721 - protein, 27 aa, Artificial Sequence
  Cyclic GFR-binding peptide
SPISMLYIDNGRVLLYKQYEDNGRVLL

SEQ ID NO: 125722 - protein, 27 aa, Artificial Sequence
  Cyclic GFR-binding peptide
EPLTVLYYDDSSNVIEQLSNDNGRVLL

SEQ ID NO: 125723 - protein, 27 aa, Artificial Sequence
  Cyclic GFR-binding peptide
DNGRVLLPYVKLVVKENEDFFLMSLSS

SEQ ID NO: 125724 - protein, 29 aa, Artificial Sequence
  Cyclic GFR-binding peptide
DNGRVLLPYVKLHQGQHPKIRFFLMSLSS

SEQ ID NO: 125725 - protein, 27 aa, Artificial Sequence
  Cyclic GFR-binding peptide
DNGRVLLPYVKLVVNKNEDFFLISLSS

SEQ ID NO: 125726 - protein, 27 aa, Artificial Sequence
  Cyclic GFR-binding peptide
DNGRVLLPYVKLVKPKRGVLFFISLSS

SEQ ID NO: 125727 - protein, 27 aa, Artificial Sequence
  Cyclic GFR-binding peptide
DNGRVLLPYVKLVVNNAADFFLISLSS

SEQ ID NO: 125728 - protein, 27 aa, Artificial Sequence
  Cyclic GFR-binding peptide
DNGRVLLPYVKLIVNNSSDFFLVSLSS

SEQ ID NO: 125729 - protein, 27 aa, Artificial Sequence
  Cyclic GFR-binding peptide
DNGRVLLPYVKLIIQQKDNFFLMSLSS

SEQ ID NO: 125730 - protein, 27 aa, Artificial Sequence
  Cyclic GFR-binding peptide
DNGRVLLPYVKLLLVRGNDFFLMSLSS

SEQ ID NO: 125731 - protein, 27 aa, Artificial Sequence
  Cyclic GFR-binding peptide
DNGRVLLPYVKLVKPTRGVLFFISLSS

SEQ ID NO: 125732 - protein, 27 aa, Artificial Sequence
  Cyclic GFR-binding peptide
DNGRVLLPYVKLVVNNASDFFLISLSS

SEQ ID NO: 125733 - protein, 27 aa, Artificial Sequence
  Cyclic GFR-binding peptide
DNGRVLLPYVKLIKPTKGILFFISLSS

SEQ ID NO: 125734 - protein, 27 aa, Artificial Sequence
  Cyclic GFR-binding peptide
DNGRVLLPYVKLTPVGMDDFFLVSLSS

SEQ ID NO: 125735 - protein, 27 aa, Artificial Sequence
  Cyclic GFR-binding peptide
DNGRVLLPYVKLYTVVGKDFFLISLSS

SEQ ID NO: 125736 - protein, 27 aa, Artificial Sequence
  Cyclic GFR-binding peptide
DNGRVLLPYVKLVVKDYEDFFLMSLSS

SEQ ID NO: 125737 - protein, 27 aa, Artificial Sequence
  Cyclic GFR-binding peptide
DNGRVLLPYVKLIVNSSDDFFLVSLSS

SEQ ID NO: 125738 - protein, 29 aa, Artificial Sequence
  Cyclic GFR-binding peptide
DNGRVLLPYVKLLKPKKRVYEFFLVSLSS

SEQ ID NO: 125739 - protein, 27 aa, Artificial Sequence
  Cyclic GFR-binding peptide
SSLSMLFFDENEKVVLKVYPDNGRVLL

SEQ ID NO: 125740 - protein, 29 aa, Artificial Sequence
  Cyclic GFR-binding peptide
SSLSMLFFRIKPHQGQHLKVYPDNGRVLL

SEQ ID NO: 125741 - protein, 27 aa, Artificial Sequence
  Cyclic GFR-binding peptide
SSLSILFFDENKNVVLKVYPDNGRVLL

SEQ ID NO: 125742 - protein, 27 aa, Artificial Sequence
  Cyclic GFR-binding peptide
SSLSILFFVGRKPKVLKVYPDNGRVLL

SEQ ID NO: 125743 - protein, 27 aa, Artificial Sequence
  Cyclic GFR-binding peptide
SSLSILFFDAANNVVLKVYPDNGRVLL

SEQ ID NO: 125744 - protein, 27 aa, Artificial Sequence
  Cyclic GFR-binding peptide
SSLSVLFFDSSNNVILKVYPDNGRVLL

SEQ ID NO: 125745 - protein, 27 aa, Artificial Sequence
  Cyclic GFR-binding peptide
SSLSMLFFNDKQQIILKVYPDNGRVLL

SEQ ID NO: 125746 - protein, 27 aa, Artificial Sequence
  Cyclic GFR-binding peptide
SSLSMLFFDNGRVLLLKVYPDNGRVLL

SEQ ID NO: 125747 - protein, 27 aa, Artificial Sequence
  Cyclic GFR-binding peptide
SSLSILFFVGRTPKVLKVYPDNGRVLL

SEQ ID NO: 125748 - protein, 27 aa, Artificial Sequence
  Cyclic GFR-binding peptide
SSLSILFFDSANNVVLKVYPDNGRVLL

SEQ ID NO: 125749 - protein, 27 aa, Artificial Sequence
  Cyclic GFR-binding peptide
SSLSILFFIGKTPKILKVYPDNGRVLL

SEQ ID NO: 125750 - protein, 27 aa, Artificial Sequence
  Cyclic GFR-binding peptide
SSLSVLFFDDMGVPTLKVYPDNGRVLL

SEQ ID NO: 125751 - protein, 27 aa, Artificial Sequence
  Cyclic GFR-binding peptide
SSLSILFFDKGVVTYLKVYPDNGRVLL

SEQ ID NO: 125752 - protein, 27 aa, Artificial Sequence
  Cyclic GFR-binding peptide
SSLSMLFFDEYDKVVLKVYPDNGRVLL

SEQ ID NO: 125753 - protein, 27 aa, Artificial Sequence
  Cyclic GFR-binding peptide
SSLSVLFFDDSSNVILKVYPDNGRVLL

SEQ ID NO: 125754 - protein, 29 aa, Artificial Sequence
  Cyclic GFR-binding peptide
SSLSVLFFEYVRKKPKLLKVYPDNGRVLL

SEQ ID NO: 125755 - protein, 27 aa, Artificial Sequence
  Cyclic GFR-binding peptide
DNGRVLLNSLQEVVKDYEDYYLMTLPE

SEQ ID NO: 125756 - protein, 27 aa, Artificial Sequence
  Cyclic GFR-binding peptide
DNGRVLLNSLQEIKPTKGIYYVIPLPE

SEQ ID NO: 125757 - protein, 27 aa, Artificial Sequence
  Cyclic GFR-binding peptide
DNGRVLLSMEGIIVNSSDDMIQVTINS

SEQ ID NO: 125758 - protein, 27 aa, Artificial Sequence
  Cyclic GFR-binding peptide
DNGRVLLNSLQEVKPKRGVYYLITLPE

SEQ ID NO: 125759 - protein, 27 aa, Artificial Sequence
  Cyclic GFR-binding peptide
DNGRVLLNSLQEVKPTRGVYYVIPLPE

SEQ ID NO: 125760 - protein, 27 aa, Artificial Sequence
  Cyclic GFR-binding peptide
DNGRVLLVTAKKVVKENEDIKRMQVPR

SEQ ID NO: 125761 - protein, 27 aa, Artificial Sequence
  Cyclic GFR-binding peptide
DNGRVLLNSLQEIVNSSDDYYVVPLPE

SEQ ID NO: 125762 - protein, 29 aa, Artificial Sequence
  Cyclic GFR-binding peptide
DNGRVLLSMEGIHQGQHPKIRMIQMTINS

SEQ ID NO: 125763 - protein, 29 aa, Artificial Sequence
  Cyclic GFR-binding peptide
DNGRVLLVTAKKLKPKKRVYEIKRVQVPR

SEQ ID NO: 125764 - protein, 27 aa, Artificial Sequence
  Cyclic GFR-binding peptide
DNGRVLLSMEGIVVKDYEDMIQMTINS

SEQ ID NO: 125765 - protein, 29 aa, Artificial Sequence
  Cyclic GFR-binding peptide
DNGRVLLVQVEKHQGQHPKIRVKAMKVSR

SEQ ID NO: 125766 - protein, 27 aa, Artificial Sequence
  Cyclic GFR-binding peptide
DNGRVLLVTAKKIKPTKGIIKRIQVPR

SEQ ID NO: 125767 - protein, 27 aa, Artificial Sequence
  Cyclic GFR-binding peptide
DNGRVLLSMEGIVKPTRGVMIQITINS

SEQ ID NO: 125768 - protein, 29 aa, Artificial Sequence
  Cyclic GFR-binding peptide
DNGRVLLNSLQEFIPKKRVIEYYVVPLPE

SEQ ID NO: 125769 - protein, 27 aa, Artificial Sequence
  Cyclic GFR-binding peptide
DNGRVLLVQVEKVKPKRGVVKAIKVSR

SEQ ID NO: 125770 - protein, 27 aa, Artificial Sequence
  Cyclic GFR-binding peptide
DNGRVLLVQVEKVVKENEDVKAMKVSR

SEQ ID NO: 125771 - protein, 27 aa, Artificial Sequence
  Cyclic GFR-binding peptide
DNGRVLLNSLQEVVKENEDYYVMPLPE

SEQ ID NO: 125772 - protein, 27 aa, Artificial Sequence
  Cyclic GFR-binding peptide
DNGRVLLVTAKKIVNSSDDIKRVQVPR

SEQ ID NO: 125773 - protein, 27 aa, Artificial Sequence
  Cyclic GFR-binding peptide
DNGRVLLVQVEKIKPTKGIVKAIKVSR

SEQ ID NO: 125774 - protein, 27 aa, Artificial Sequence
  Cyclic GFR-binding peptide
DNGRVLLNSLQEIKPTKGIYYLITLPE

SEQ ID NO: 125775 - protein, 29 aa, Artificial Sequence
  Cyclic GFR-binding peptide
DNGRVLLNSLQEFIPKKRVIEYYLVTLPE

SEQ ID NO: 125776 - protein, 27 aa, Artificial Sequence
  Cyclic GFR-binding peptide
DNGRVLLVQVEKIVNSSDDVKAVKVSR

SEQ ID NO: 125777 - protein, 27 aa, Artificial Sequence
  Cyclic GFR-binding peptide
DNGRVLLNSLQEIVNSSDDYYLVTLPE

SEQ ID NO: 125778 - protein, 29 aa, Artificial Sequence
  Cyclic GFR-binding peptide
DNGRVLLVQVEKLKPKKRVYEVKAVKVSR

SEQ ID NO: 125779 - protein, 29 aa, Artificial Sequence
  Cyclic GFR-binding peptide
DNGRVLLVQVEKFIPKKRVIEVKAVKVSR

SEQ ID NO: 125780 - protein, 29 aa, Artificial Sequence
  Cyclic GFR-binding peptide
DNGRVLLVTAKKHQGQHPKIRIKRMQVPR

SEQ ID NO: 125781 - protein, 27 aa, Artificial Sequence
  Cyclic GFR-binding peptide
DNGRVLLNSLQEVVKENEDYYLMTLPE

SEQ ID NO: 125782 - protein, 29 aa, Artificial Sequence
  Cyclic GFR-binding peptide
DNGRVLLSMEGIFIPKKRVIEMIQVTINS

SEQ ID NO: 125783 - protein, 27 aa, Artificial Sequence
  Cyclic GFR-binding peptide
DNGRVLLNSLQEVKPKRGVYYVIPLPE

SEQ ID NO: 125784 - protein, 27 aa, Artificial Sequence
  Cyclic GFR-binding peptide
DNGRVLLVTAKKVKPKRGVIKRIQVPR

SEQ ID NO: 125785 - protein, 27 aa, Artificial Sequence
  Cyclic GFR-binding peptide
DNGRVLLNSLQEVKPTRGVYYLITLPE

SEQ ID NO: 125786 - protein, 27 aa, Artificial Sequence
  Cyclic GFR-binding peptide
DNGRVLLVQVEKVKPTRGVVKAIKVSR

SEQ ID NO: 125787 - protein, 29 aa, Artificial Sequence
  Cyclic GFR-binding peptide
DNGRVLLSMEGILKPKKRVYEMIQVTINS

SEQ ID NO: 125788 - protein, 27 aa, Artificial Sequence
  Cyclic GFR-binding peptide
DNGRVLLNSLQEVVKDYEDYYVMPLPE

SEQ ID NO: 125789 - protein, 27 aa, Artificial Sequence
  Cyclic GFR-binding peptide
DNGRVLLVTAKKVKPTRGVIKRIQVPR

SEQ ID NO: 125790 - protein, 29 aa, Artificial Sequence
  Cyclic GFR-binding peptide
DNGRVLLNSLQELKPKKRVYEYYLVTLPE

SEQ ID NO: 125791 - protein, 27 aa, Artificial Sequence
  Cyclic GFR-binding peptide
DNGRVLLSMEGIVKPKRGVMIQITINS

SEQ ID NO: 125792 - protein, 27 aa, Artificial Sequence
  Cyclic GFR-binding peptide
DNGRVLLSMEGIVVKENEDMIQMTINS

SEQ ID NO: 125793 - protein, 27 aa, Artificial Sequence
  Cyclic GFR-binding peptide
DNGRVLLSMEGIIKPTKGIMIQITINS

SEQ ID NO: 125794 - protein, 29 aa, Artificial Sequence
  Cyclic GFR-binding peptide
DNGRVLLNSLQEHQGQHPKIRYYLMTLPE

SEQ ID NO: 125795 - protein, 27 aa, Artificial Sequence
  Cyclic GFR-binding peptide
DNGRVLLVTAKKVVKDYEDIKRMQVPR

SEQ ID NO: 125796 - protein, 29 aa, Artificial Sequence
  Cyclic GFR-binding peptide
DNGRVLLNSLQEHQGQHPKIRYYVMPLPE

SEQ ID NO: 125797 - protein, 29 aa, Artificial Sequence
  Cyclic GFR-binding peptide
DNGRVLLNSLQELKPKKRVYEYYVVPLPE

SEQ ID NO: 125798 - protein, 29 aa, Artificial Sequence
  Cyclic GFR-binding peptide
DNGRVLLVTAKKFIPKKRVIEIKRVQVPR

SEQ ID NO: 125799 - protein, 27 aa, Artificial Sequence
  Cyclic GFR-binding peptide
DNGRVLLVQVEKVVKDYEDVKAMKVSR

SEQ ID NO: 125800 - protein, 27 aa, Artificial Sequence
  Cyclic GFR-binding peptide
EPLTMLYYDEYDKVVEQLSNDNGRVLL

SEQ ID NO: 125801 - protein, 27 aa, Artificial Sequence
  Cyclic GFR-binding peptide
EPLPIVYYIGKTPKIEQLSNDNGRVLL

SEQ ID NO: 125802 - protein, 27 aa, Artificial Sequence
  Cyclic GFR-binding peptide
SNITVQIMDDSSNVIIGEMSDNGRVLL

SEQ ID NO: 125803 - protein, 27 aa, Artificial Sequence
  Cyclic GFR-binding peptide
EPLTILYYVGRKPKVEQLSNDNGRVLL

SEQ ID NO: 125804 - protein, 27 aa, Artificial Sequence
  Cyclic GFR-binding peptide
EPLPIVYYVGRTPKVEQLSNDNGRVLL

SEQ ID NO: 125805 - protein, 27 aa, Artificial Sequence
  Cyclic GFR-binding peptide
RPVQMRKIDENEKVVKKATVDNGRVLL

SEQ ID NO: 125806 - protein, 27 aa, Artificial Sequence
  Cyclic GFR-binding peptide
EPLPVVYYDDSSNVIEQLSNDNGRVLL

SEQ ID NO: 125807 - protein, 29 aa, Artificial Sequence
  Cyclic GFR-binding peptide
SNITMQIMRIKPHQGQHIGEMSDNGRVLL

SEQ ID NO: 125808 - protein, 29 aa, Artificial Sequence
  Cyclic GFR-binding peptide
RPVQVRKIEYVRKKPKLKKATVDNGRVLL

SEQ ID NO: 125809 - protein, 27 aa, Artificial Sequence
  Cyclic GFR-binding peptide
SNITMQIMDEYDKVVIGEMSDNGRVLL

SEQ ID NO: 125810 - protein, 29 aa, Artificial Sequence
  Cyclic GFR-binding peptide
RSVKMAKVRIKPHQGQHKEVQVDNGRVLL

SEQ ID NO: 125811 - protein, 27 aa, Artificial Sequence
  Cyclic GFR-binding peptide
RPVQIRKIIGKTPKIKKATVDNGRVLL

SEQ ID NO: 125812 - protein, 27 aa, Artificial Sequence
  Cyclic GFR-binding peptide
SNITIQIMVGRTPKVIGEMSDNGRVLL

SEQ ID NO: 125813 - protein, 29 aa, Artificial Sequence
  Cyclic GFR-binding peptide
EPLPVVYYEIVRKKPIFEQLSNDNGRVLL

SEQ ID NO: 125814 - protein, 27 aa, Artificial Sequence
  Cyclic GFR-binding peptide
RSVKIAKVVGRKPKVKEVQVDNGRVLL

SEQ ID NO: 125815 - protein, 27 aa, Artificial Sequence
  Cyclic GFR-binding peptide
RSVKMAKVDENEKVVKEVQVDNGRVLL

SEQ ID NO: 125816 - protein, 27 aa, Artificial Sequence
  Cyclic GFR-binding peptide
EPLPMVYYDENEKVVEQLSNDNGRVLL

SEQ ID NO: 125817 - protein, 27 aa, Artificial Sequence
  Cyclic GFR-binding peptide
RPVQVRKIDDSSNVIKKATVDNGRVLL

SEQ ID NO: 125818 - protein, 27 aa, Artificial Sequence
  Cyclic GFR-binding peptide
RSVKIAKVIGKTPKIKEVQVDNGRVLL

SEQ ID NO: 125819 - protein, 27 aa, Artificial Sequence
  Cyclic GFR-binding peptide
EPLTILYYIGKTPKIEQLSNDNGRVLL

SEQ ID NO: 125820 - protein, 29 aa, Artificial Sequence
  Cyclic GFR-binding peptide
EPLTVLYYEIVRKKPIFEQLSNDNGRVLL

SEQ ID NO: 125821 - protein, 27 aa, Artificial Sequence
  Cyclic GFR-binding peptide
RSVKVAKVDDSSNVIKEVQVDNGRVLL

SEQ ID NO: 125822 - protein, 27 aa, Artificial Sequence
  Cyclic GFR-binding peptide
EPLTVLYYDDSSNVIEQLSNDNGRVLL

SEQ ID NO: 125823 - protein, 29 aa, Artificial Sequence
  Cyclic GFR-binding peptide
RSVKVAKVEYVRKKPKLKEVQVDNGRVLL

SEQ ID NO: 125824 - protein, 29 aa, Artificial Sequence
  Cyclic GFR-binding peptide
RSVKVAKVEIVRKKPIFKEVQVDNGRVLL

SEQ ID NO: 125825 - protein, 29 aa, Artificial Sequence
  Cyclic GFR-binding peptide
RPVQMRKIRIKPHQGQHKKATVDNGRVLL

SEQ ID NO: 125826 - protein, 27 aa, Artificial Sequence
  Cyclic GFR-binding peptide
EPLTMLYYDENEKVVEQLSNDNGRVLL

SEQ ID NO: 125827 - protein, 29 aa, Artificial Sequence
  Cyclic GFR-binding peptide
SNITVQIMEIVRKKPIFIGEMSDNGRVLL

SEQ ID NO: 125828 - protein, 27 aa, Artificial Sequence
  Cyclic GFR-binding peptide
EPLPIVYYVGRKPKVEQLSNDNGRVLL

SEQ ID NO: 125829 - protein, 27 aa, Artificial Sequence
  Cyclic GFR-binding peptide
RPVQIRKIVGRKPKVKKATVDNGRVLL

SEQ ID NO: 125830 - protein, 27 aa, Artificial Sequence
  Cyclic GFR-binding peptide
EPLTILYYVGRTPKVEQLSNDNGRVLL

SEQ ID NO: 125831 - protein, 27 aa, Artificial Sequence
  Cyclic GFR-binding peptide
RSVKIAKVVGRTPKVKEVQVDNGRVLL

SEQ ID NO: 125832 - protein, 29 aa, Artificial Sequence
  Cyclic GFR-binding peptide
SNITVQIMEYVRKKPKLIGEMSDNGRVLL

SEQ ID NO: 125833 - protein, 27 aa, Artificial Sequence
  Cyclic GFR-binding peptide
EPLPMVYYDEYDKVVEQLSNDNGRVLL

SEQ ID NO: 125834 - protein, 27 aa, Artificial Sequence
  Cyclic GFR-binding peptide
RPVQIRKIVGRTPKVKKATVDNGRVLL

SEQ ID NO: 125835 - protein, 29 aa, Artificial Sequence
  Cyclic GFR-binding peptide
EPLTVLYYEYVRKKPKLEQLSNDNGRVLL

SEQ ID NO: 125836 - protein, 27 aa, Artificial Sequence
  Cyclic GFR-binding peptide
SNITIQIMVGRKPKVIGEMSDNGRVLL

SEQ ID NO: 125837 - protein, 27 aa, Artificial Sequence
  Cyclic GFR-binding peptide
SNITMQIMDENEKVVIGEMSDNGRVLL

SEQ ID NO: 125838 - protein, 27 aa, Artificial Sequence
  Cyclic GFR-binding peptide
SNITIQIMIGKTPKIIGEMSDNGRVLL

SEQ ID NO: 125839 - protein, 29 aa, Artificial Sequence
  Cyclic GFR-binding peptide
EPLTMLYYRIKPHQGQHEQLSNDNGRVLL

SEQ ID NO: 125840 - protein, 27 aa, Artificial Sequence
  Cyclic GFR-binding peptide
RPVQMRKIDEYDKVVKKATVDNGRVLL

SEQ ID NO: 125841 - protein, 29 aa, Artificial Sequence
  Cyclic GFR-binding peptide
EPLPMVYYRIKPHQGQHEQLSNDNGRVLL

SEQ ID NO: 125842 - protein, 29 aa, Artificial Sequence
  Cyclic GFR-binding peptide
EPLPVVYYEYVRKKPKLEQLSNDNGRVLL

SEQ ID NO: 125843 - protein, 29 aa, Artificial Sequence
  Cyclic GFR-binding peptide
RPVQVRKIEIVRKKPIFKKATVDNGRVLL

SEQ ID NO: 125844 - protein, 27 aa, Artificial Sequence
  Cyclic GFR-binding peptide
RSVKMAKVDEYDKVVKEVQVDNGRVLL

SEQ ID NO: 125845 - protein, 27 aa, Artificial Sequence
  Cyclic GFR-binding peptide
DNGRVLLRYKKLIIQQKDNFYLMSIAN

SEQ ID NO: 125846 - protein, 27 aa, Artificial Sequence
  Cyclic GFR-binding peptide
DNGRVLLRYKKLIVNNSSDFYLVSIAN

SEQ ID NO: 125847 - protein, 27 aa, Artificial Sequence
  Cyclic GFR-binding peptide
DNGRVLLRYKKLYTVVGKDFYLISIAN

SEQ ID NO: 125848 - protein, 27 aa, Artificial Sequence
  Cyclic GFR-binding peptide
DNGRVLLRYKKLIVNSSDDFYLVSIAN

SEQ ID NO: 125849 - protein, 27 aa, Artificial Sequence
  Cyclic GFR-binding peptide
DNGRVLLRYKKLVVKDYEDFYLMSIAN

SEQ ID NO: 125850 - protein, 27 aa, Artificial Sequence
  Cyclic GFR-binding peptide
DNGRVLLRYKKLLLVRGNDFYLMSIAN

SEQ ID NO: 125851 - protein, 27 aa, Artificial Sequence
  Cyclic GFR-binding peptide
DNGRVLLRYKKLVVKENEDFYLMSIAN

SEQ ID NO: 125852 - protein, 27 aa, Artificial Sequence
  Cyclic GFR-binding peptide
DNGRVLLRYKKLVVNNAADFYLISIAN

SEQ ID NO: 125853 - protein, 27 aa, Artificial Sequence
  Cyclic GFR-binding peptide
DNGRVLLRYKKLTPVGMDDFYLVSIAN

SEQ ID NO: 125854 - protein, 27 aa, Artificial Sequence
  Cyclic GFR-binding peptide
DNGRVLLRYKKLVVNNASDFYLISIAN

SEQ ID NO: 125855 - protein, 27 aa, Artificial Sequence
  Cyclic GFR-binding peptide
NAISMLYFNDKQQIILKKYRDNGRVLL

SEQ ID NO: 125856 - protein, 27 aa, Artificial Sequence
  Cyclic GFR-binding peptide
NAISVLYFDSSNNVILKKYRDNGRVLL

SEQ ID NO: 125857 - protein, 27 aa, Artificial Sequence
  Cyclic GFR-binding peptide
NAISILYFDKGVVTYLKKYRDNGRVLL

SEQ ID NO: 125858 - protein, 27 aa, Artificial Sequence
  Cyclic GFR-binding peptide
NAISVLYFDDSSNVILKKYRDNGRVLL

SEQ ID NO: 125859 - protein, 27 aa, Artificial Sequence
  Cyclic GFR-binding peptide
NAISMLYFDEYDKVVLKKYRDNGRVLL

SEQ ID NO: 125860 - protein, 27 aa, Artificial Sequence
  Cyclic GFR-binding peptide
NAISMLYFDNGRVLLLKKYRDNGRVLL

SEQ ID NO: 125861 - protein, 27 aa, Artificial Sequence
  Cyclic GFR-binding peptide
NAISMLYFDENEKVVLKKYRDNGRVLL

SEQ ID NO: 125862 - protein, 27 aa, Artificial Sequence
  Cyclic GFR-binding peptide
NAISILYFDAANNVVLKKYRDNGRVLL

SEQ ID NO: 125863 - protein, 27 aa, Artificial Sequence
  Cyclic GFR-binding peptide
NAISVLYFDDMGVPTLKKYRDNGRVLL

SEQ ID NO: 125864 - protein, 27 aa, Artificial Sequence
  Cyclic GFR-binding peptide
NAISILYFDSANNVVLKKYRDNGRVLL

SEQ ID NO: 125865 - protein, 27 aa, Artificial Sequence
  Cyclic GFR-binding peptide
DNGRVLLEYKFKVKPTRGVLYLISIPE

SEQ ID NO: 125866 - protein, 27 aa, Artificial Sequence
  Cyclic GFR-binding peptide
DNGRVLLYHYKLVVKDYEDKYLMSIPS

SEQ ID NO: 125867 - protein, 27 aa, Artificial Sequence
  Cyclic GFR-binding peptide
DNGRVLLEYKFKTPVGMDDLYLVSIPE

SEQ ID NO: 125868 - protein, 27 aa, Artificial Sequence
  Cyclic GFR-binding peptide
DNGRVLLRYKKLVVKDYEDFYLMSIAN

SEQ ID NO: 125869 - protein, 27 aa, Artificial Sequence
  Cyclic GFR-binding peptide
DNGRVLLRHKRLVKPKRGVYYLISTAS

SEQ ID NO: 125870 - protein, 27 aa, Artificial Sequence
  Cyclic GFR-binding peptide
DNGRVLLYHYKLVKPKRGVKYLISIPS

SEQ ID NO: 125871 - protein, 27 aa, Artificial Sequence
  Cyclic GFR-binding peptide
DNGRVLLEYKFKIKPTKGILYLISIPE

SEQ ID NO: 125872 - protein, 27 aa, Artificial Sequence
  Cyclic GFR-binding peptide
DNGRVLLEYKFKVVNKNEDLYLISIPE

SEQ ID NO: 125873 - protein, 27 aa, Artificial Sequence
  Cyclic GFR-binding peptide
DNGRVLLPIKGYVKPTRGVFYLINIPS

SEQ ID NO: 125874 - protein, 27 aa, Artificial Sequence
  Cyclic GFR-binding peptide
DNGRVLLPIKGYVVKENEDFYLMNIPS

SEQ ID NO: 125875 - protein, 27 aa, Artificial Sequence
  Cyclic GFR-binding peptide
DNGRVLLYHYKLYTVVGKDKYLISIPS

SEQ ID NO: 125876 - protein, 27 aa, Artificial Sequence
  Cyclic GFR-binding peptide
DNGRVLLEYKFKLLVRGNDLYLMSIPE

SEQ ID NO: 125877 - protein, 27 aa, Artificial Sequence
  Cyclic GFR-binding peptide
DNGRVLLRYKKLVKPKRGVFYLISIAN

SEQ ID NO: 125878 - protein, 27 aa, Artificial Sequence
  Cyclic GFR-binding peptide
DNGRVLLPIKGYTPVGMDDFYLVNIPS

SEQ ID NO: 125879 - protein, 27 aa, Artificial Sequence
  Cyclic GFR-binding peptide
DNGRVLLYHYKLVVNKNEDKYLISIPS

SEQ ID NO: 125880 - protein, 27 aa, Artificial Sequence
  Cyclic GFR-binding peptide
DNGRVLLYHYKLIVNSSDDKYLVSIPS

SEQ ID NO: 125881 - protein, 27 aa, Artificial Sequence
  Cyclic GFR-binding peptide
DNGRVLLPIKGYIVNSSDDFYLVNIPS

SEQ ID NO: 125882 - protein, 27 aa, Artificial Sequence
  Cyclic GFR-binding peptide
DNGRVLLRYKKLYTVVGKDFYLISIAN

SEQ ID NO: 125883 - protein, 27 aa, Artificial Sequence
  Cyclic GFR-binding peptide
DNGRVLLRHKRLLLVRGNDYYLMSTAS

SEQ ID NO: 125884 - protein, 27 aa, Artificial Sequence
  Cyclic GFR-binding peptide
DNGRVLLYHYKLLLVRGNDKYLMSIPS

SEQ ID NO: 125885 - protein, 27 aa, Artificial Sequence
  Cyclic GFR-binding peptide
DNGRVLLRYKKLIVNSSDDFYLVSIAN

SEQ ID NO: 125886 - protein, 27 aa, Artificial Sequence
  Cyclic GFR-binding peptide
DNGRVLLRHKRLVVNKNEDYYLISTAS

SEQ ID NO: 125887 - protein, 27 aa, Artificial Sequence
  Cyclic GFR-binding peptide
DNGRVLLRHKRLIKPTKGIYYLISTAS

SEQ ID NO: 125888 - protein, 27 aa, Artificial Sequence
  Cyclic GFR-binding peptide
DNGRVLLPIKGYYTVVGKDFYLINIPS

SEQ ID NO: 125889 - protein, 27 aa, Artificial Sequence
  Cyclic GFR-binding peptide
DNGRVLLYHYKLTPVGMDDKYLVSIPS

SEQ ID NO: 125890 - protein, 27 aa, Artificial Sequence
  Cyclic GFR-binding peptide
DNGRVLLRHKRLIVNNSSDYYLVSTAS

SEQ ID NO: 125891 - protein, 27 aa, Artificial Sequence
  Cyclic GFR-binding peptide
DNGRVLLRYKKLLLVRGNDFYLMSIAN

SEQ ID NO: 125892 - protein, 27 aa, Artificial Sequence
  Cyclic GFR-binding peptide
DNGRVLLYHYKLVKPTRGVKYLISIPS

SEQ ID NO: 125893 - protein, 27 aa, Artificial Sequence
  Cyclic GFR-binding peptide
DNGRVLLRHKRLIVNSSDDYYLVSTAS

SEQ ID NO: 125894 - protein, 27 aa, Artificial Sequence
  Cyclic GFR-binding peptide
DNGRVLLPIKGYLLVRGNDFYLMNIPS

SEQ ID NO: 125895 - protein, 27 aa, Artificial Sequence
  Cyclic GFR-binding peptide
DNGRVLLRYKKLVVNKNEDFYLISIAN

SEQ ID NO: 125896 - protein, 27 aa, Artificial Sequence
  Cyclic GFR-binding peptide
DNGRVLLEYKFKVVKDYEDLYLMSIPE

SEQ ID NO: 125897 - protein, 27 aa, Artificial Sequence
  Cyclic GFR-binding peptide
DNGRVLLPIKGYVVNKNEDFYLINIPS

SEQ ID NO: 125898 - protein, 27 aa, Artificial Sequence
  Cyclic GFR-binding peptide
DNGRVLLPIKGYIKPTKGIFYLINIPS

SEQ ID NO: 125899 - protein, 27 aa, Artificial Sequence
  Cyclic GFR-binding peptide
DNGRVLLEYKFKVVNNAADLYLISIPE

SEQ ID NO: 125900 - protein, 27 aa, Artificial Sequence
  Cyclic GFR-binding peptide
DNGRVLLRHKRLYTVVGKDYYLISTAS

SEQ ID NO: 125901 - protein, 27 aa, Artificial Sequence
  Cyclic GFR-binding peptide
DNGRVLLRYKKLIKPTKGIFYLISIAN

SEQ ID NO: 125902 - protein, 27 aa, Artificial Sequence
  Cyclic GFR-binding peptide
DNGRVLLPIKGYVVKDYEDFYLMNIPS

SEQ ID NO: 125903 - protein, 27 aa, Artificial Sequence
  Cyclic GFR-binding peptide
DNGRVLLEYKFKVVNNASDLYLISIPE

SEQ ID NO: 125904 - protein, 27 aa, Artificial Sequence
  Cyclic GFR-binding peptide
DNGRVLLRYKKLVKPTRGVFYLISIAN

SEQ ID NO: 125905 - protein, 27 aa, Artificial Sequence
  Cyclic GFR-binding peptide
DNGRVLLRHKRLVVKENEDYYLMSTAS

SEQ ID NO: 125906 - protein, 27 aa, Artificial Sequence
  Cyclic GFR-binding peptide
DNGRVLLYHYKLIKPTKGIKYLISIPS

SEQ ID NO: 125907 - protein, 27 aa, Artificial Sequence
  Cyclic GFR-binding peptide
DNGRVLLYHYKLVVKENEDKYLMSIPS

SEQ ID NO: 125908 - protein, 27 aa, Artificial Sequence
  Cyclic GFR-binding peptide
DNGRVLLRHKRLIIQQKDNYYLMSTAS

SEQ ID NO: 125909 - protein, 27 aa, Artificial Sequence
  Cyclic GFR-binding peptide
DNGRVLLRYKKLVVKENEDFYLMSIAN

SEQ ID NO: 125910 - protein, 27 aa, Artificial Sequence
  Cyclic GFR-binding peptide
DNGRVLLRYKKLVVNNAADFYLISIAN

SEQ ID NO: 125911 - protein, 27 aa, Artificial Sequence
  Cyclic GFR-binding peptide
DNGRVLLEYKFKIIQQKDNLYLMSIPE

SEQ ID NO: 125912 - protein, 27 aa, Artificial Sequence
  Cyclic GFR-binding peptide
DNGRVLLRYKKLTPVGMDDFYLVSIAN

SEQ ID NO: 125913 - protein, 27 aa, Artificial Sequence
  Cyclic GFR-binding peptide
DNGRVLLYHYKLVVNNAADKYLISIPS

SEQ ID NO: 125914 - protein, 27 aa, Artificial Sequence
  Cyclic GFR-binding peptide
DNGRVLLPIKGYIVNNSSDFYLVNIPS

SEQ ID NO: 125915 - protein, 27 aa, Artificial Sequence
  Cyclic GFR-binding peptide
DNGRVLLPIKGYVKPKRGVFYLINIPS

SEQ ID NO: 125916 - protein, 27 aa, Artificial Sequence
  Cyclic GFR-binding peptide
DNGRVLLRYKKLIIQQKDNFYLMSIAN

SEQ ID NO: 125917 - protein, 27 aa, Artificial Sequence
  Cyclic GFR-binding peptide
DNGRVLLPIKGYIIQQKDNFYLMNIPS

SEQ ID NO: 125918 - protein, 27 aa, Artificial Sequence
  Cyclic GFR-binding peptide
DNGRVLLRYKKLIVNNSSDFYLVSIAN

SEQ ID NO: 125919 - protein, 27 aa, Artificial Sequence
  Cyclic GFR-binding peptide
DNGRVLLPIKGYVVNNAADFYLINIPS

SEQ ID NO: 125920 - protein, 27 aa, Artificial Sequence
  Cyclic GFR-binding peptide
DNGRVLLRHKRLVKPTRGVYYLISTAS

SEQ ID NO: 125921 - protein, 27 aa, Artificial Sequence
  Cyclic GFR-binding peptide
DNGRVLLEYKFKIVNNSSDLYLVSIPE

SEQ ID NO: 125922 - protein, 27 aa, Artificial Sequence
  Cyclic GFR-binding peptide
DNGRVLLRHKRLVVNNASDYYLISTAS

SEQ ID NO: 125923 - protein, 27 aa, Artificial Sequence
  Cyclic GFR-binding peptide
DNGRVLLRHKRLTPVGMDDYYLVSTAS

SEQ ID NO: 125924 - protein, 27 aa, Artificial Sequence
  Cyclic GFR-binding peptide
DNGRVLLYHYKLIVNNSSDKYLVSIPS

SEQ ID NO: 125925 - protein, 27 aa, Artificial Sequence
  Cyclic GFR-binding peptide
DNGRVLLYHYKLVVNNASDKYLISIPS

SEQ ID NO: 125926 - protein, 27 aa, Artificial Sequence
  Cyclic GFR-binding peptide
DNGRVLLEYKFKIVNSSDDLYLVSIPE

SEQ ID NO: 125927 - protein, 27 aa, Artificial Sequence
  Cyclic GFR-binding peptide
DNGRVLLEYKFKVKPKRGVLYLISIPE

SEQ ID NO: 125928 - protein, 27 aa, Artificial Sequence
  Cyclic GFR-binding peptide
DNGRVLLRHKRLVVKDYEDYYLMSTAS

SEQ ID NO: 125929 - protein, 27 aa, Artificial Sequence
  Cyclic GFR-binding peptide
DNGRVLLEYKFKVVKENEDLYLMSIPE

SEQ ID NO: 125930 - protein, 27 aa, Artificial Sequence
  Cyclic GFR-binding peptide
DNGRVLLEYKFKYTVVGKDLYLISIPE

SEQ ID NO: 125931 - protein, 27 aa, Artificial Sequence
  Cyclic GFR-binding peptide
DNGRVLLPIKGYVVNNASDFYLINIPS

SEQ ID NO: 125932 - protein, 27 aa, Artificial Sequence
  Cyclic GFR-binding peptide
DNGRVLLYHYKLIIQQKDNKYLMSIPS

SEQ ID NO: 125933 - protein, 27 aa, Artificial Sequence
  Cyclic GFR-binding peptide
DNGRVLLRYKKLVVNNASDFYLISIAN

SEQ ID NO: 125934 - protein, 27 aa, Artificial Sequence
  Cyclic GFR-binding peptide
DNGRVLLRHKRLVVNNAADYYLISTAS

SEQ ID NO: 125935 - protein, 27 aa, Artificial Sequence
  Cyclic GFR-binding peptide
EPISILYLVGRTPKVKFKYEDNGRVLL

SEQ ID NO: 125936 - protein, 27 aa, Artificial Sequence
  Cyclic GFR-binding peptide
SPISMLYKDEYDKVVLKYHYDNGRVLL

SEQ ID NO: 125937 - protein, 27 aa, Artificial Sequence
  Cyclic GFR-binding peptide
EPISVLYLDDMGVPTKFKYEDNGRVLL

SEQ ID NO: 125938 - protein, 27 aa, Artificial Sequence
  Cyclic GFR-binding peptide
NAISMLYFDEYDKVVLKKYRDNGRVLL

SEQ ID NO: 125939 - protein, 27 aa, Artificial Sequence
  Cyclic GFR-binding peptide
SATSILYYVGRKPKVLRKHRDNGRVLL

SEQ ID NO: 125940 - protein, 27 aa, Artificial Sequence
  Cyclic GFR-binding peptide
SPISILYKVGRKPKVLKYHYDNGRVLL

SEQ ID NO: 125941 - protein, 27 aa, Artificial Sequence
  Cyclic GFR-binding peptide
EPISILYLIGKTPKIKFKYEDNGRVLL

SEQ ID NO: 125942 - protein, 27 aa, Artificial Sequence
  Cyclic GFR-binding peptide
EPISILYLDENKNVVKFKYEDNGRVLL

SEQ ID NO: 125943 - protein, 27 aa, Artificial Sequence
  Cyclic GFR-binding peptide
SPINILYFVGRTPKVYGKIPDNGRVLL

SEQ ID NO: 125944 - protein, 27 aa, Artificial Sequence
  Cyclic GFR-binding peptide
SPINMLYFDENEKVVYGKIPDNGRVLL

SEQ ID NO: 125945 - protein, 27 aa, Artificial Sequence
  Cyclic GFR-binding peptide
SPISILYKDKGVVTYLKYHYDNGRVLL

SEQ ID NO: 125946 - protein, 27 aa, Artificial Sequence
  Cyclic GFR-binding peptide
EPISMLYLDNGRVLLKFKYEDNGRVLL

SEQ ID NO: 125947 - protein, 27 aa, Artificial Sequence
  Cyclic GFR-binding peptide
NAISILYFVGRKPKVLKKYRDNGRVLL

SEQ ID NO: 125948 - protein, 27 aa, Artificial Sequence
  Cyclic GFR-binding peptide
SPINVLYFDDMGVPTYGKIPDNGRVLL

SEQ ID NO: 125949 - protein, 27 aa, Artificial Sequence
  Cyclic GFR-binding peptide
SPISILYKDENKNVVLKYHYDNGRVLL

SEQ ID NO: 125950 - protein, 27 aa, Artificial Sequence
  Cyclic GFR-binding peptide
SPISVLYKDDSSNVILKYHYDNGRVLL

SEQ ID NO: 125951 - protein, 27 aa, Artificial Sequence
  Cyclic GFR-binding peptide
SPINVLYFDDSSNVIYGKIPDNGRVLL

SEQ ID NO: 125952 - protein, 27 aa, Artificial Sequence
  Cyclic GFR-binding peptide
NAISILYFDKGVVTYLKKYRDNGRVLL

SEQ ID NO: 125953 - protein, 27 aa, Artificial Sequence
  Cyclic GFR-binding peptide
SATSMLYYDNGRVLLLRKHRDNGRVLL

SEQ ID NO: 125954 - protein, 27 aa, Artificial Sequence
  Cyclic GFR-binding peptide
SPISMLYKDNGRVLLLKYHYDNGRVLL

SEQ ID NO: 125955 - protein, 27 aa, Artificial Sequence
  Cyclic GFR-binding peptide
NAISVLYFDDSSNVILKKYRDNGRVLL

SEQ ID NO: 125956 - protein, 27 aa, Artificial Sequence
  Cyclic GFR-binding peptide
SATSILYYDENKNVVLRKHRDNGRVLL

SEQ ID NO: 125957 - protein, 27 aa, Artificial Sequence
  Cyclic GFR-binding peptide
SATSILYYIGKTPKILRKHRDNGRVLL

SEQ ID NO: 125958 - protein, 27 aa, Artificial Sequence
  Cyclic GFR-binding peptide
SPINILYFDKGVVTYYGKIPDNGRVLL

SEQ ID NO: 125959 - protein, 27 aa, Artificial Sequence
  Cyclic GFR-binding peptide
SPISVLYKDDMGVPTLKYHYDNGRVLL

SEQ ID NO: 125960 - protein, 27 aa, Artificial Sequence
  Cyclic GFR-binding peptide
SATSVLYYDSSNNVILRKHRDNGRVLL

SEQ ID NO: 125961 - protein, 27 aa, Artificial Sequence
  Cyclic GFR-binding peptide
NAISMLYFDNGRVLLLKKYRDNGRVLL

SEQ ID NO: 125962 - protein, 27 aa, Artificial Sequence
  Cyclic GFR-binding peptide
SPISILYKVGRTPKVLKYHYDNGRVLL

SEQ ID NO: 125963 - protein, 27 aa, Artificial Sequence
  Cyclic GFR-binding peptide
SATSVLYYDDSSNVILRKHRDNGRVLL

SEQ ID NO: 125964 - protein, 27 aa, Artificial Sequence
  Cyclic GFR-binding peptide
SPINMLYFDNGRVLLYGKIPDNGRVLL

SEQ ID NO: 125965 - protein, 27 aa, Artificial Sequence
  Cyclic GFR-binding peptide
NAISILYFDENKNVVLKKYRDNGRVLL

SEQ ID NO: 125966 - protein, 27 aa, Artificial Sequence
  Cyclic GFR-binding peptide
EPISMLYLDEYDKVVKFKYEDNGRVLL

SEQ ID NO: 125967 - protein, 27 aa, Artificial Sequence
  Cyclic GFR-binding peptide
SPINILYFDENKNVVYGKIPDNGRVLL

SEQ ID NO: 125968 - protein, 27 aa, Artificial Sequence
  Cyclic GFR-binding peptide
SPINILYFIGKTPKIYGKIPDNGRVLL

SEQ ID NO: 125969 - protein, 27 aa, Artificial Sequence
  Cyclic GFR-binding peptide
EPISILYLDAANNVVKFKYEDNGRVLL

SEQ ID NO: 125970 - protein, 27 aa, Artificial Sequence
  Cyclic GFR-binding peptide
SATSILYYDKGVVTYLRKHRDNGRVLL

SEQ ID NO: 125971 - protein, 27 aa, Artificial Sequence
  Cyclic GFR-binding peptide
NAISILYFIGKTPKILKKYRDNGRVLL

SEQ ID NO: 125972 - protein, 27 aa, Artificial Sequence
  Cyclic GFR-binding peptide
SPINMLYFDEYDKVVYGKIPDNGRVLL

SEQ ID NO: 125973 - protein, 27 aa, Artificial Sequence
  Cyclic GFR-binding peptide
EPISILYLDSANNVVKFKYEDNGRVLL

SEQ ID NO: 125974 - protein, 27 aa, Artificial Sequence
  Cyclic GFR-binding peptide
NAISILYFVGRTPKVLKKYRDNGRVLL

SEQ ID NO: 125975 - protein, 27 aa, Artificial Sequence
  Cyclic GFR-binding peptide
SATSMLYYDENEKVVLRKHRDNGRVLL

SEQ ID NO: 125976 - protein, 27 aa, Artificial Sequence
  Cyclic GFR-binding peptide
SPISILYKIGKTPKILKYHYDNGRVLL

SEQ ID NO: 125977 - protein, 27 aa, Artificial Sequence
  Cyclic GFR-binding peptide
SPISMLYKDENEKVVLKYHYDNGRVLL

SEQ ID NO: 125978 - protein, 27 aa, Artificial Sequence
  Cyclic GFR-binding peptide
SATSMLYYNDKQQIILRKHRDNGRVLL

SEQ ID NO: 125979 - protein, 27 aa, Artificial Sequence
  Cyclic GFR-binding peptide
NAISMLYFDENEKVVLKKYRDNGRVLL

SEQ ID NO: 125980 - protein, 27 aa, Artificial Sequence
  Cyclic GFR-binding peptide
NAISILYFDAANNVVLKKYRDNGRVLL

SEQ ID NO: 125981 - protein, 27 aa, Artificial Sequence
  Cyclic GFR-binding peptide
EPISMLYLNDKQQIIKFKYEDNGRVLL

SEQ ID NO: 125982 - protein, 27 aa, Artificial Sequence
  Cyclic GFR-binding peptide
NAISVLYFDDMGVPTLKKYRDNGRVLL

SEQ ID NO: 125983 - protein, 27 aa, Artificial Sequence
  Cyclic GFR-binding peptide
SPISILYKDAANNVVLKYHYDNGRVLL

SEQ ID NO: 125984 - protein, 27 aa, Artificial Sequence
  Cyclic GFR-binding peptide
SPINVLYFDSSNNVIYGKIPDNGRVLL

SEQ ID NO: 125985 - protein, 27 aa, Artificial Sequence
  Cyclic GFR-binding peptide
SPINILYFVGRKPKVYGKIPDNGRVLL

SEQ ID NO: 125986 - protein, 27 aa, Artificial Sequence
  Cyclic GFR-binding peptide
NAISMLYFNDKQQIILKKYRDNGRVLL

SEQ ID NO: 125987 - protein, 27 aa, Artificial Sequence
  Cyclic GFR-binding peptide
SPINMLYFNDKQQIIYGKIPDNGRVLL

SEQ ID NO: 125988 - protein, 27 aa, Artificial Sequence
  Cyclic GFR-binding peptide
NAISVLYFDSSNNVILKKYRDNGRVLL

SEQ ID NO: 125989 - protein, 27 aa, Artificial Sequence
  Cyclic GFR-binding peptide
SPINILYFDAANNVVYGKIPDNGRVLL

SEQ ID NO: 125990 - protein, 27 aa, Artificial Sequence
  Cyclic GFR-binding peptide
SATSILYYVGRTPKVLRKHRDNGRVLL

SEQ ID NO: 125991 - protein, 27 aa, Artificial Sequence
  Cyclic GFR-binding peptide
EPISVLYLDSSNNVIKFKYEDNGRVLL

SEQ ID NO: 125992 - protein, 27 aa, Artificial Sequence
  Cyclic GFR-binding peptide
SATSILYYDSANNVVLRKHRDNGRVLL

SEQ ID NO: 125993 - protein, 27 aa, Artificial Sequence
  Cyclic GFR-binding peptide
SATSVLYYDDMGVPTLRKHRDNGRVLL

SEQ ID NO: 125994 - protein, 27 aa, Artificial Sequence
  Cyclic GFR-binding peptide
SPISVLYKDSSNNVILKYHYDNGRVLL

SEQ ID NO: 125995 - protein, 27 aa, Artificial Sequence
  Cyclic GFR-binding peptide
SPISILYKDSANNVVLKYHYDNGRVLL

SEQ ID NO: 125996 - protein, 27 aa, Artificial Sequence
  Cyclic GFR-binding peptide
EPISVLYLDDSSNVIKFKYEDNGRVLL

SEQ ID NO: 125997 - protein, 27 aa, Artificial Sequence
  Cyclic GFR-binding peptide
EPISILYLVGRKPKVKFKYEDNGRVLL

SEQ ID NO: 125998 - protein, 27 aa, Artificial Sequence
  Cyclic GFR-binding peptide
SATSMLYYDEYDKVVLRKHRDNGRVLL

SEQ ID NO: 125999 - protein, 27 aa, Artificial Sequence
  Cyclic GFR-binding peptide
EPISMLYLDENEKVVKFKYEDNGRVLL

SEQ ID NO: 126000 - protein, 27 aa, Artificial Sequence
  Cyclic GFR-binding peptide
EPISILYLDKGVVTYKFKYEDNGRVLL

SEQ ID NO: 126001 - protein, 27 aa, Artificial Sequence
  Cyclic GFR-binding peptide
SPINILYFDSANNVVYGKIPDNGRVLL

SEQ ID NO: 126002 - protein, 27 aa, Artificial Sequence
  Cyclic GFR-binding peptide
SPISMLYKNDKQQIILKYHYDNGRVLL

SEQ ID NO: 126003 - protein, 27 aa, Artificial Sequence
  Cyclic GFR-binding peptide
NAISILYFDSANNVVLKKYRDNGRVLL

SEQ ID NO: 126004 - protein, 27 aa, Artificial Sequence
  Cyclic GFR-binding peptide
SATSILYYDAANNVVLRKHRDNGRVLL

SEQ ID NO: 126005 - protein, 27 aa, Artificial Sequence
  Cyclic GFR-binding peptide
DNGRVLLSMEGIIIQQKDNMIQMTINS

SEQ ID NO: 126006 - protein, 27 aa, Artificial Sequence
  Cyclic GFR-binding peptide
DNGRVLLSMEGIIVNSSDDMIQVTINS

SEQ ID NO: 126007 - protein, 27 aa, Artificial Sequence
  Cyclic GFR-binding peptide
DNGRVLLSMEGLVKPKRGVMIQITINS

SEQ ID NO: 126008 - protein, 27 aa, Artificial Sequence
  Cyclic GFR-binding peptide
DNGRVLLSMEGLVVNNASDMIQITINS

SEQ ID NO: 126009 - protein, 29 aa, Artificial Sequence
  Cyclic GFR-binding peptide
DNGRVLLSMEGIFIPKKRVIEMIQVTINS

SEQ ID NO: 126010 - protein, 27 aa, Artificial Sequence
  Cyclic GFR-binding peptide
DNGRVLLSMEGILLVRGNDMIQMTINS

SEQ ID NO: 126011 - protein, 29 aa, Artificial Sequence
  Cyclic GFR-binding peptide
DNGRVLLSMEGILKPKKRVYEMIQVTINS

SEQ ID NO: 126012 - protein, 27 aa, Artificial Sequence
  Cyclic GFR-binding peptide
DNGRVLLSMEGLIKPTKGIMIQITINS

SEQ ID NO: 126013 - protein, 27 aa, Artificial Sequence
  Cyclic GFR-binding peptide
DNGRVLLSMEGLIVNSSDDMIQVTINS

SEQ ID NO: 126014 - protein, 29 aa, Artificial Sequence
  Cyclic GFR-binding peptide
DNGRVLLSMEGIHQGQHPKIRMIQMTINS

SEQ ID NO: 126015 - protein, 27 aa, Artificial Sequence
  Cyclic GFR-binding peptide
DNGRVLLSMEGIVVNNASDMIQITINS

SEQ ID NO: 126016 - protein, 29 aa, Artificial Sequence
  Cyclic GFR-binding peptide
DNGRVLLSMEGLLKPKKRVYEMIQVTINS

SEQ ID NO: 126017 - protein, 27 aa, Artificial Sequence
  Cyclic GFR-binding peptide
DNGRVLLSMEGIVKPKRGVMIQITINS

SEQ ID NO: 126018 - protein, 27 aa, Artificial Sequence
  Cyclic GFR-binding peptide
DNGRVLLSMEGIVKPTRGVMIQITINS

SEQ ID NO: 126019 - protein, 27 aa, Artificial Sequence
  Cyclic GFR-binding peptide
DNGRVLLSMEGLVVNNAADMIQITINS

SEQ ID NO: 126020 - protein, 27 aa, Artificial Sequence
  Cyclic GFR-binding peptide
DNGRVLLSMEGLLLVRGNDMIQMTINS

SEQ ID NO: 126021 - protein, 27 aa, Artificial Sequence
  Cyclic GFR-binding peptide
DNGRVLLSMEGIIKPTKGIMIQITINS

SEQ ID NO: 126022 - protein, 27 aa, Artificial Sequence
  Cyclic GFR-binding peptide
DNGRVLLSMEGLIIQQKDNMIQMTINS

SEQ ID NO: 126023 - protein, 29 aa, Artificial Sequence
  Cyclic GFR-binding peptide
DNGRVLLSMEGLHQGQHPKIRMIQMTINS

SEQ ID NO: 126024 - protein, 27 aa, Artificial Sequence
  Cyclic GFR-binding peptide
DNGRVLLSMEGIVVNNAADMIQITINS

SEQ ID NO: 126025 - protein, 29 aa, Artificial Sequence
  Cyclic GFR-binding peptide
DNGRVLLSMEGLFIPKKRVIEMIQVTINS

SEQ ID NO: 126026 - protein, 27 aa, Artificial Sequence
  Cyclic GFR-binding peptide
DNGRVLLSMEGLVKPTRGVMIQITINS

SEQ ID NO: 126027 - protein, 27 aa, Artificial Sequence
  Cyclic GFR-binding peptide
SNITMQIMNDKQQIIIGEMSDNGRVLL

SEQ ID NO: 126028 - protein, 27 aa, Artificial Sequence
  Cyclic GFR-binding peptide
SNITVQIMDDSSNVIIGEMSDNGRVLL

SEQ ID NO: 126029 - protein, 27 aa, Artificial Sequence
  Cyclic GFR-binding peptide
SNITIQIMVGRKPKVLGEMSDNGRVLL

SEQ ID NO: 126030 - protein, 27 aa, Artificial Sequence
  Cyclic GFR-binding peptide
SNITIQIMDSANNVVLGEMSDNGRVLL

SEQ ID NO: 126031 - protein, 29 aa, Artificial Sequence
  Cyclic GFR-binding peptide
SNITVQIMEIVRKKPIFIGEMSDNGRVLL

SEQ ID NO: 126032 - protein, 27 aa, Artificial Sequence
  Cyclic GFR-binding peptide
SNITMQIMDNGRVLLIGEMSDNGRVLL

SEQ ID NO: 126033 - protein, 29 aa, Artificial Sequence
  Cyclic GFR-binding peptide
SNITVQIMEYVRKKPKLIGEMSDNGRVLL

SEQ ID NO: 126034 - protein, 27 aa, Artificial Sequence
  Cyclic GFR-binding peptide
SNITIQIMIGKTPKILGEMSDNGRVLL

SEQ ID NO: 126035 - protein, 27 aa, Artificial Sequence
  Cyclic GFR-binding peptide
SNITVQIMDDSSNVILGEMSDNGRVLL

SEQ ID NO: 126036 - protein, 29 aa, Artificial Sequence
  Cyclic GFR-binding peptide
SNITMQIMRIKPHQGQHIGEMSDNGRVLL

SEQ ID NO: 126037 - protein, 27 aa, Artificial Sequence
  Cyclic GFR-binding peptide
SNITIQIMDSANNVVIGEMSDNGRVLL

SEQ ID NO: 126038 - protein, 29 aa, Artificial Sequence
  Cyclic GFR-binding peptide
SNITVQIMEYVRKKPKLLGEMSDNGRVLL

SEQ ID NO: 126039 - protein, 27 aa, Artificial Sequence
  Cyclic GFR-binding peptide
SNITIQIMVGRKPKVIGEMSDNGRVLL

SEQ ID NO: 126040 - protein, 27 aa, Artificial Sequence
  Cyclic GFR-binding peptide
SNITIQIMVGRTPKVIGEMSDNGRVLL

SEQ ID NO: 126041 - protein, 27 aa, Artificial Sequence
  Cyclic GFR-binding peptide
SNITIQIMDAANNVVLGEMSDNGRVLL

SEQ ID NO: 126042 - protein, 27 aa, Artificial Sequence
  Cyclic GFR-binding peptide
SNITMQIMDNGRVLLLGEMSDNGRVLL

SEQ ID NO: 126043 - protein, 27 aa, Artificial Sequence
  Cyclic GFR-binding peptide
SNITIQIMIGKTPKIIGEMSDNGRVLL

SEQ ID NO: 126044 - protein, 27 aa, Artificial Sequence
  Cyclic GFR-binding peptide
SNITMQIMNDKQQIILGEMSDNGRVLL

SEQ ID NO: 126045 - protein, 29 aa, Artificial Sequence
  Cyclic GFR-binding peptide
SNITMQIMRIKPHQGQHLGEMSDNGRVLL

SEQ ID NO: 126046 - protein, 27 aa, Artificial Sequence
  Cyclic GFR-binding peptide
SNITIQIMDAANNVVIGEMSDNGRVLL

SEQ ID NO: 126047 - protein, 29 aa, Artificial Sequence
  Cyclic GFR-binding peptide
SNITVQIMEIVRKKPIFLGEMSDNGRVLL

SEQ ID NO: 126048 - protein, 27 aa, Artificial Sequence
  Cyclic GFR-binding peptide
SNITIQIMVGRTPKVLGEMSDNGRVLL

SEQ ID NO: 126049 - protein, 27 aa, Artificial Sequence
  Cyclic GFR-binding peptide
DNGRVLLRYKKLIKPTKGIFYLISIAN

SEQ ID NO: 126050 - protein, 27 aa, Artificial Sequence
  Cyclic GFR-binding peptide
DNGRVLLQYNKLVVNKNEDLYLISIAS

SEQ ID NO: 126051 - protein, 27 aa, Artificial Sequence
  Cyclic GFR-binding peptide
DNGRVLLQYNKLVVNNAADLYLISIAS

SEQ ID NO: 126052 - protein, 27 aa, Artificial Sequence
  Cyclic GFR-binding peptide
DNGRVLLQYNKLIVNNSSDLYLVSIAS

SEQ ID NO: 126053 - protein, 27 aa, Artificial Sequence
  Cyclic GFR-binding peptide
DNGRVLLRYKKLVVKDYEDFYLMSIAN

SEQ ID NO: 126054 - protein, 27 aa, Artificial Sequence
  Cyclic GFR-binding peptide
DNGRVLLRYKKLVKPTRGVFYLISIAN

SEQ ID NO: 126055 - protein, 27 aa, Artificial Sequence
  Cyclic GFR-binding peptide
DNGRVLLQYNKLIIQQKDNLYLMSIAS

SEQ ID NO: 126056 - protein, 27 aa, Artificial Sequence
  Cyclic GFR-binding peptide
DNGRVLLQYNKLLLVRGNDLYLMSIAS

SEQ ID NO: 126057 - protein, 27 aa, Artificial Sequence
  Cyclic GFR-binding peptide
DNGRVLLQYNKLVKPTRGVLYLISIAS

SEQ ID NO: 126058 - protein, 27 aa, Artificial Sequence
  Cyclic GFR-binding peptide
DNGRVLLRYKKLVVKENEDFYLMSIAN

SEQ ID NO: 126059 - protein, 27 aa, Artificial Sequence
  Cyclic GFR-binding peptide
DNGRVLLRYKKLVVNNAADFYLISIAN

SEQ ID NO: 126060 - protein, 27 aa, Artificial Sequence
  Cyclic GFR-binding peptide
DNGRVLLQYNKLTPVGMDDLYLVSIAS

SEQ ID NO: 126061 - protein, 27 aa, Artificial Sequence
  Cyclic GFR-binding peptide
DNGRVLLRYKKLTPVGMDDFYLVSIAN

SEQ ID NO: 126062 - protein, 27 aa, Artificial Sequence
  Cyclic GFR-binding peptide
DNGRVLLRYKKLVKPKRGVFYLISIAN

SEQ ID NO: 126063 - protein, 27 aa, Artificial Sequence
  Cyclic GFR-binding peptide
DNGRVLLQYNKLVVKENEDLYLMSIAS

SEQ ID NO: 126064 - protein, 27 aa, Artificial Sequence
  Cyclic GFR-binding peptide
DNGRVLLRYKKLIIQQKDNFYLMSIAN

SEQ ID NO: 126065 - protein, 27 aa, Artificial Sequence
  Cyclic GFR-binding peptide
DNGRVLLQYNKLVKPKRGVLYLISIAS

SEQ ID NO: 126066 - protein, 27 aa, Artificial Sequence
  Cyclic GFR-binding peptide
DNGRVLLRYKKLIVNNSSDFYLVSIAN

SEQ ID NO: 126067 - protein, 27 aa, Artificial Sequence
  Cyclic GFR-binding peptide
DNGRVLLRYKKLYTVVGKDFYLISIAN

SEQ ID NO: 126068 - protein, 27 aa, Artificial Sequence
  Cyclic GFR-binding peptide
DNGRVLLRYKKLIVNSSDDFYLVSIAN

SEQ ID NO: 126069 - protein, 27 aa, Artificial Sequence
  Cyclic GFR-binding peptide
DNGRVLLRYKKLLLVRGNDFYLMSIAN

SEQ ID NO: 126070 - protein, 27 aa, Artificial Sequence
  Cyclic GFR-binding peptide
DNGRVLLQYNKLVVNNASDLYLISIAS

SEQ ID NO: 126071 - protein, 27 aa, Artificial Sequence
  Cyclic GFR-binding peptide
DNGRVLLQYNKLIKPTKGILYLISIAS

SEQ ID NO: 126072 - protein, 27 aa, Artificial Sequence
  Cyclic GFR-binding peptide
DNGRVLLRYKKLVVNKNEDFYLISIAN

SEQ ID NO: 126073 - protein, 27 aa, Artificial Sequence
  Cyclic GFR-binding peptide
DNGRVLLQYNKLYTVVGKDLYLISIAS

SEQ ID NO: 126074 - protein, 27 aa, Artificial Sequence
  Cyclic GFR-binding peptide
DNGRVLLQYNKLVVKDYEDLYLMSIAS

SEQ ID NO: 126075 - protein, 27 aa, Artificial Sequence
  Cyclic GFR-binding peptide
DNGRVLLRYKKLVVNNASDFYLISIAN

SEQ ID NO: 126076 - protein, 27 aa, Artificial Sequence
  Cyclic GFR-binding peptide
DNGRVLLQYNKLIVNSSDDLYLVSIAS

SEQ ID NO: 126077 - protein, 27 aa, Artificial Sequence
  Cyclic GFR-binding peptide
NAISILYFIGKTPKILKKYRDNGRVLL

SEQ ID NO: 126078 - protein, 27 aa, Artificial Sequence
  Cyclic GFR-binding peptide
SAISILYLDENKNVVLKNYQDNGRVLL

SEQ ID NO: 126079 - protein, 27 aa, Artificial Sequence
  Cyclic GFR-binding peptide
SAISILYLDAANNVVLKNYQDNGRVLL

SEQ ID NO: 126080 - protein, 27 aa, Artificial Sequence
  Cyclic GFR-binding peptide
SAISVLYLDSSNNVILKNYQDNGRVLL

SEQ ID NO: 126081 - protein, 27 aa, Artificial Sequence
  Cyclic GFR-binding peptide
NAISMLYFDEYDKVVLKKYRDNGRVLL

SEQ ID NO: 126082 - protein, 27 aa, Artificial Sequence
  Cyclic GFR-binding peptide
NAISILYFVGRTPKVLKKYRDNGRVLL

SEQ ID NO: 126083 - protein, 27 aa, Artificial Sequence
  Cyclic GFR-binding peptide
SAISMLYLNDKQQIILKNYQDNGRVLL

SEQ ID NO: 126084 - protein, 27 aa, Artificial Sequence
  Cyclic GFR-binding peptide
SAISMLYLDNGRVLLLKNYQDNGRVLL

SEQ ID NO: 126085 - protein, 27 aa, Artificial Sequence
  Cyclic GFR-binding peptide
SAISILYLVGRTPKVLKNYQDNGRVLL

SEQ ID NO: 126086 - protein, 27 aa, Artificial Sequence
  Cyclic GFR-binding peptide
NAISMLYFDENEKVVLKKYRDNGRVLL

SEQ ID NO: 126087 - protein, 27 aa, Artificial Sequence
  Cyclic GFR-binding peptide
NAISILYFDAANNVVLKKYRDNGRVLL

SEQ ID NO: 126088 - protein, 27 aa, Artificial Sequence
  Cyclic GFR-binding peptide
SAISVLYLDDMGVPTLKNYQDNGRVLL

SEQ ID NO: 126089 - protein, 27 aa, Artificial Sequence
  Cyclic GFR-binding peptide
NAISVLYFDDMGVPTLKKYRDNGRVLL

SEQ ID NO: 126090 - protein, 27 aa, Artificial Sequence
  Cyclic GFR-binding peptide
NAISILYFVGRKPKVLKKYRDNGRVLL

SEQ ID NO: 126091 - protein, 27 aa, Artificial Sequence
  Cyclic GFR-binding peptide
SAISMLYLDENEKVVLKNYQDNGRVLL

SEQ ID NO: 126092 - protein, 27 aa, Artificial Sequence
  Cyclic GFR-binding peptide
NAISMLYFNDKQQIILKKYRDNGRVLL

SEQ ID NO: 126093 - protein, 27 aa, Artificial Sequence
  Cyclic GFR-binding peptide
SAISILYLVGRKPKVLKNYQDNGRVLL

SEQ ID NO: 126094 - protein, 27 aa, Artificial Sequence
  Cyclic GFR-binding peptide
NAISVLYFDSSNNVILKKYRDNGRVLL

SEQ ID NO: 126095 - protein, 27 aa, Artificial Sequence
  Cyclic GFR-binding peptide
NAISILYFDKGVVTYLKKYRDNGRVLL

SEQ ID NO: 126096 - protein, 27 aa, Artificial Sequence
  Cyclic GFR-binding peptide
NAISVLYFDDSSNVILKKYRDNGRVLL

SEQ ID NO: 126097 - protein, 27 aa, Artificial Sequence
  Cyclic GFR-binding peptide
NAISMLYFDNGRVLLLKKYRDNGRVLL

SEQ ID NO: 126098 - protein, 27 aa, Artificial Sequence
  Cyclic GFR-binding peptide
SAISILYLDSANNVVLKNYQDNGRVLL

SEQ ID NO: 126099 - protein, 27 aa, Artificial Sequence
  Cyclic GFR-binding peptide
SAISILYLIGKTPKILKNYQDNGRVLL

SEQ ID NO: 126100 - protein, 27 aa, Artificial Sequence
  Cyclic GFR-binding peptide
NAISILYFDENKNVVLKKYRDNGRVLL

SEQ ID NO: 126101 - protein, 27 aa, Artificial Sequence
  Cyclic GFR-binding peptide
SAISILYLDKGVVTYLKNYQDNGRVLL

SEQ ID NO: 126102 - protein, 27 aa, Artificial Sequence
  Cyclic GFR-binding peptide
SAISMLYLDEYDKVVLKNYQDNGRVLL

SEQ ID NO: 126103 - protein, 27 aa, Artificial Sequence
  Cyclic GFR-binding peptide
NAISILYFDSANNVVLKKYRDNGRVLL

SEQ ID NO: 126104 - protein, 27 aa, Artificial Sequence
  Cyclic GFR-binding peptide
SAISVLYLDDSSNVILKNYQDNGRVLL

SEQ ID NO: 126105 - protein, 29 aa, Artificial Sequence
  Cyclic GFR-binding peptide
DNGRVLLVTAKKLKPKKRVYEIKRVQVPR

SEQ ID NO: 126106 - protein, 29 aa, Artificial Sequence
  Cyclic GFR-binding peptide
DNGRVLLVQVEKLKPKKRVYEVKAVKVSR

SEQ ID NO: 126107 - protein, 27 aa, Artificial Sequence
  Cyclic GFR-binding peptide
DNGRVLLVTAKKVKPTRGVIKRIQVPR

SEQ ID NO: 126108 - protein, 29 aa, Artificial Sequence
  Cyclic GFR-binding peptide
DNGRVLLVQVEKFIPKKRVIEVKAVKVSR

SEQ ID NO: 126109 - protein, 29 aa, Artificial Sequence
  Cyclic GFR-binding peptide
DNGRVLLVQVEKHQGQHPKIRVKAMKVSR

SEQ ID NO: 126110 - protein, 29 aa, Artificial Sequence
  Cyclic GFR-binding peptide
DNGRVLLVTAKKHQGQHPKIRIKRMQVPR

SEQ ID NO: 126111 - protein, 27 aa, Artificial Sequence
  Cyclic GFR-binding peptide
DNGRVLLVTAKKIKPTKGIIKRIQVPR

SEQ ID NO: 126112 - protein, 27 aa, Artificial Sequence
  Cyclic GFR-binding peptide
DNGRVLLVQVEKVKPKRGVVKAIKVSR

SEQ ID NO: 126113 - protein, 27 aa, Artificial Sequence
  Cyclic GFR-binding peptide
DNGRVLLVTAKKVKPKRGVIKRIQVPR

SEQ ID NO: 126114 - protein, 27 aa, Artificial Sequence
  Cyclic GFR-binding peptide
DNGRVLLVQVEKIKPTKGIVKAIKVSR

SEQ ID NO: 126115 - protein, 27 aa, Artificial Sequence
  Cyclic GFR-binding peptide
DNGRVLLVQVEKVKPTRGVVKAIKVSR

SEQ ID NO: 126116 - protein, 29 aa, Artificial Sequence
  Cyclic GFR-binding peptide
DNGRVLLVTAKKFIPKKRVIEIKRVQVPR

SEQ ID NO: 126117 - protein, 29 aa, Artificial Sequence
  Cyclic GFR-binding peptide
RPVQVRKIEYVRKKPKLKKATVDNGRVLL

SEQ ID NO: 126118 - protein, 29 aa, Artificial Sequence
  Cyclic GFR-binding peptide
RSVKVAKVEYVRKKPKLKEVQVDNGRVLL

SEQ ID NO: 126119 - protein, 27 aa, Artificial Sequence
  Cyclic GFR-binding peptide
RPVQIRKIVGRTPKVKKATVDNGRVLL

SEQ ID NO: 126120 - protein, 29 aa, Artificial Sequence
  Cyclic GFR-binding peptide
RSVKVAKVEIVRKKPIFKEVQVDNGRVLL

SEQ ID NO: 126121 - protein, 29 aa, Artificial Sequence
  Cyclic GFR-binding peptide
RSVKMAKVRIKPHQGQHKEVQVDNGRVLL

SEQ ID NO: 126122 - protein, 29 aa, Artificial Sequence
  Cyclic GFR-binding peptide
RPVQMRKIRIKPHQGQHKKATVDNGRVLL

SEQ ID NO: 126123 - protein, 27 aa, Artificial Sequence
  Cyclic GFR-binding peptide
RPVQIRKIIGKTPKIKKATVDNGRVLL

SEQ ID NO: 126124 - protein, 27 aa, Artificial Sequence
  Cyclic GFR-binding peptide
RSVKIAKVVGRKPKVKEVQVDNGRVLL

SEQ ID NO: 126125 - protein, 27 aa, Artificial Sequence
  Cyclic GFR-binding peptide
RPVQIRKIVGRKPKVKKATVDNGRVLL

SEQ ID NO: 126126 - protein, 27 aa, Artificial Sequence
  Cyclic GFR-binding peptide
RSVKIAKVIGKTPKIKEVQVDNGRVLL

SEQ ID NO: 126127 - protein, 27 aa, Artificial Sequence
  Cyclic GFR-binding peptide
RSVKIAKVVGRTPKVKEVQVDNGRVLL

SEQ ID NO: 126128 - protein, 29 aa, Artificial Sequence
  Cyclic GFR-binding peptide
RPVQVRKIEIVRKKPIFKKATVDNGRVLL

SEQ ID NO: 126129 - protein, 27 aa, Artificial Sequence
  Cyclic GFR-binding peptide
VGRKPKVRYKKLIKPTKGIFYLISIAN

SEQ ID NO: 126130 - protein, 29 aa, Artificial Sequence
  Cyclic GFR-binding peptide
VGRKPKVRHKRLFIPKKRVIEYYLVSTAS

SEQ ID NO: 126131 - protein, 27 aa, Artificial Sequence
  Cyclic GFR-binding peptide
VGRKPKVYHYKLVVKDYEDKYLMSIPS

SEQ ID NO: 126132 - protein, 27 aa, Artificial Sequence
  Cyclic GFR-binding peptide
VGRKPKVQYNKLIVNNSSDLYLVSIAS

SEQ ID NO: 126133 - protein, 27 aa, Artificial Sequence
  Cyclic GFR-binding peptide
VGRKPKVRYKKLVVKDYEDFYLMSIAN

SEQ ID NO: 126134 - protein, 27 aa, Artificial Sequence
  Cyclic GFR-binding peptide
VGRKPKVRYKKLVKPTRGVFYLISIAN

SEQ ID NO: 126135 - protein, 27 aa, Artificial Sequence
  Cyclic GFR-binding peptide
VGRKPKVRHKRLVVKENEDYYLMSTAS

SEQ ID NO: 126136 - protein, 27 aa, Artificial Sequence
  Cyclic GFR-binding peptide
VGRKPKVYHYKLIKPTKGIKYLISIPS

SEQ ID NO: 126137 - protein, 29 aa, Artificial Sequence
  Cyclic GFR-binding peptide
VGRKPKVRYKKLFIPKKRVIEFYLVSIAN

SEQ ID NO: 126138 - protein, 27 aa, Artificial Sequence
  Cyclic GFR-binding peptide
VGRKPKVYHYKLVVKENEDKYLMSIPS

SEQ ID NO: 126139 - protein, 27 aa, Artificial Sequence
  Cyclic GFR-binding peptide
VGRKPKVRHKRLVKPKRGVYYLISTAS

SEQ ID NO: 126140 - protein, 27 aa, Artificial Sequence
  Cyclic GFR-binding peptide
VGRKPKVYHYKLVKPKRGVKYLISIPS

SEQ ID NO: 126141 - protein, 29 aa, Artificial Sequence
  Cyclic GFR-binding peptide
VGRKPKVQYNKLFIPKKRVIELYLVSIAS

SEQ ID NO: 126142 - protein, 27 aa, Artificial Sequence
  Cyclic GFR-binding peptide
VGRKPKVQYNKLVKPTRGVLYLISIAS

SEQ ID NO: 126143 - protein, 27 aa, Artificial Sequence
  Cyclic GFR-binding peptide
VGRKPKVRYKKLVVKENEDFYLMSIAN

SEQ ID NO: 126144 - protein, 27 aa, Artificial Sequence
  Cyclic GFR-binding peptide
VGRKPKVQYNKLTPVGMDDLYLVSIAS

SEQ ID NO: 126145 - protein, 27 aa, Artificial Sequence
  Cyclic GFR-binding peptide
VGRKPKVRYKKLTPVGMDDFYLVSIAN

SEQ ID NO: 126146 - protein, 27 aa, Artificial Sequence
  Cyclic GFR-binding peptide
VGRKPKVRYKKLVKPKRGVFYLISIAN

SEQ ID NO: 126147 - protein, 27 aa, Artificial Sequence
  Cyclic GFR-binding peptide
VGRKPKVQYNKLVVKENEDLYLMSIAS

SEQ ID NO: 126148 - protein, 27 aa, Artificial Sequence
  Cyclic GFR-binding peptide
VGRKPKVYHYKLIVNSSDDKYLVSIPS

SEQ ID NO: 126149 - protein, 27 aa, Artificial Sequence
  Cyclic GFR-binding peptide
VGRKPKVQYNKLVKPKRGVLYLISIAS

SEQ ID NO: 126150 - protein, 27 aa, Artificial Sequence
  Cyclic GFR-binding peptide
VGRKPKVRYKKLIVNNSSDFYLVSIAN

SEQ ID NO: 126151 - protein, 27 aa, Artificial Sequence
  Cyclic GFR-binding peptide
VGRKPKVRYKKLIVNSSDDFYLVSIAN

SEQ ID NO: 126152 - protein, 27 aa, Artificial Sequence
  Cyclic GFR-binding peptide
VGRKPKVRHKRLVKPTRGVYYLISTAS

SEQ ID NO: 126153 - protein, 29 aa, Artificial Sequence
  Cyclic GFR-binding peptide
VGRKPKVYHYKLFIPKKRVIEKYLVSIPS

SEQ ID NO: 126154 - protein, 27 aa, Artificial Sequence
  Cyclic GFR-binding peptide
VGRKPKVRHKRLIKPTKGIYYLISTAS

SEQ ID NO: 126155 - protein, 27 aa, Artificial Sequence
  Cyclic GFR-binding peptide
VGRKPKVRHKRLTPVGMDDYYLVSTAS

SEQ ID NO: 126156 - protein, 27 aa, Artificial Sequence
  Cyclic GFR-binding peptide
VGRKPKVYHYKLTPVGMDDKYLVSIPS

SEQ ID NO: 126157 - protein, 27 aa, Artificial Sequence
  Cyclic GFR-binding peptide
VGRKPKVYHYKLIVNNSSDKYLVSIPS

SEQ ID NO: 126158 - protein, 27 aa, Artificial Sequence
  Cyclic GFR-binding peptide
VGRKPKVRHKRLIVNNSSDYYLVSTAS

SEQ ID NO: 126159 - protein, 27 aa, Artificial Sequence
  Cyclic GFR-binding peptide
VGRKPKVYHYKLVKPTRGVKYLISIPS

SEQ ID NO: 126160 - protein, 27 aa, Artificial Sequence
  Cyclic GFR-binding peptide
VGRKPKVRHKRLIVNSSDDYYLVSTAS

SEQ ID NO: 126161 - protein, 27 aa, Artificial Sequence
  Cyclic GFR-binding peptide
VGRKPKVRHKRLVVKDYEDYYLMSTAS

SEQ ID NO: 126162 - protein, 27 aa, Artificial Sequence
  Cyclic GFR-binding peptide
VGRKPKVQYNKLIKPTKGILYLISIAS

SEQ ID NO: 126163 - protein, 27 aa, Artificial Sequence
  Cyclic GFR-binding peptide
VGRKPKVQYNKLVVKDYEDLYLMSIAS

SEQ ID NO: 126164 - protein, 27 aa, Artificial Sequence
  Cyclic GFR-binding peptide
VGRKPKVQYNKLIVNSSDDLYLVSIAS

SEQ ID NO: 126165 - protein, 27 aa, Artificial Sequence
  Cyclic GFR-binding peptide
NAISILYFIGKTPKILKKYRVGRKPKV

SEQ ID NO: 126166 - protein, 29 aa, Artificial Sequence
  Cyclic GFR-binding peptide
SATSVLYYEIVRKKPIFLRKHRVGRKPKV

SEQ ID NO: 126167 - protein, 27 aa, Artificial Sequence
  Cyclic GFR-binding peptide
SPISMLYKDEYDKVVLKYHYVGRKPKV

SEQ ID NO: 126168 - protein, 27 aa, Artificial Sequence
  Cyclic GFR-binding peptide
SAISVLYLDSSNNVILKNYQVGRKPKV

SEQ ID NO: 126169 - protein, 27 aa, Artificial Sequence
  Cyclic GFR-binding peptide
NAISMLYFDEYDKVVLKKYRVGRKPKV

SEQ ID NO: 126170 - protein, 27 aa, Artificial Sequence
  Cyclic GFR-binding peptide
NAISILYFVGRTPKVLKKYRVGRKPKV

SEQ ID NO: 126171 - protein, 27 aa, Artificial Sequence
  Cyclic GFR-binding peptide
SATSMLYYDENEKVVLRKHRVGRKPKV

SEQ ID NO: 126172 - protein, 27 aa, Artificial Sequence
  Cyclic GFR-binding peptide
SPISILYKIGKTPKILKYHYVGRKPKV

SEQ ID NO: 126173 - protein, 29 aa, Artificial Sequence
  Cyclic GFR-binding peptide
NAISVLYFEIVRKKPIFLKKYRVGRKPKV

SEQ ID NO: 126174 - protein, 27 aa, Artificial Sequence
  Cyclic GFR-binding peptide
SPISMLYKDENEKVVLKYHYVGRKPKV

SEQ ID NO: 126175 - protein, 27 aa, Artificial Sequence
  Cyclic GFR-binding peptide
SATSILYYVGRKPKVLRKHRVGRKPKV

SEQ ID NO: 126176 - protein, 27 aa, Artificial Sequence
  Cyclic GFR-binding peptide
SPISILYKVGRKPKVLKYHYVGRKPKV

SEQ ID NO: 126177 - protein, 29 aa, Artificial Sequence
  Cyclic GFR-binding peptide
SAISVLYLEIVRKKPIFLKNYQVGRKPKV

SEQ ID NO: 126178 - protein, 27 aa, Artificial Sequence
  Cyclic GFR-binding peptide
SAISILYLVGRTPKVLKNYQVGRKPKV

SEQ ID NO: 126179 - protein, 27 aa, Artificial Sequence
  Cyclic GFR-binding peptide
NAISMLYFDENEKVVLKKYRVGRKPKV

SEQ ID NO: 126180 - protein, 27 aa, Artificial Sequence
  Cyclic GFR-binding peptide
SAISVLYLDDMGVPTLKNYQVGRKPKV

SEQ ID NO: 126181 - protein, 27 aa, Artificial Sequence
  Cyclic GFR-binding peptide
NAISVLYFDDMGVPTLKKYRVGRKPKV

SEQ ID NO: 126182 - protein, 27 aa, Artificial Sequence
  Cyclic GFR-binding peptide
NAISILYFVGRKPKVLKKYRVGRKPKV

SEQ ID NO: 126183 - protein, 27 aa, Artificial Sequence
  Cyclic GFR-binding peptide
SAISMLYLDENEKVVLKNYQVGRKPKV

SEQ ID NO: 126184 - protein, 27 aa, Artificial Sequence
  Cyclic GFR-binding peptide
SPISVLYKDDSSNVILKYHYVGRKPKV

SEQ ID NO: 126185 - protein, 27 aa, Artificial Sequence
  Cyclic GFR-binding peptide
SAISILYLVGRKPKVLKNYQVGRKPKV

SEQ ID NO: 126186 - protein, 27 aa, Artificial Sequence
  Cyclic GFR-binding peptide
NAISVLYFDSSNNVILKKYRVGRKPKV

SEQ ID NO: 126187 - protein, 27 aa, Artificial Sequence
  Cyclic GFR-binding peptide
NAISVLYFDDSSNVILKKYRVGRKPKV

SEQ ID NO: 126188 - protein, 27 aa, Artificial Sequence
  Cyclic GFR-binding peptide
SATSILYYVGRTPKVLRKHRVGRKPKV

SEQ ID NO: 126189 - protein, 29 aa, Artificial Sequence
  Cyclic GFR-binding peptide
SPISVLYKEIVRKKPIFLKYHYVGRKPKV

SEQ ID NO: 126190 - protein, 27 aa, Artificial Sequence
  Cyclic GFR-binding peptide
SATSILYYIGKTPKILRKHRVGRKPKV

SEQ ID NO: 126191 - protein, 27 aa, Artificial Sequence
  Cyclic GFR-binding peptide
SATSVLYYDDMGVPTLRKHRVGRKPKV

SEQ ID NO: 126192 - protein, 27 aa, Artificial Sequence
  Cyclic GFR-binding peptide
SPISVLYKDDMGVPTLKYHYVGRKPKV

SEQ ID NO: 126193 - protein, 27 aa, Artificial Sequence
  Cyclic GFR-binding peptide
SPISVLYKDSSNNVILKYHYVGRKPKV

SEQ ID NO: 126194 - protein, 27 aa, Artificial Sequence
  Cyclic GFR-binding peptide
SATSVLYYDSSNNVILRKHRVGRKPKV

SEQ ID NO: 126195 - protein, 27 aa, Artificial Sequence
  Cyclic GFR-binding peptide
SPISILYKVGRTPKVLKYHYVGRKPKV

SEQ ID NO: 126196 - protein, 27 aa, Artificial Sequence
  Cyclic GFR-binding peptide
SATSVLYYDDSSNVILRKHRVGRKPKV

SEQ ID NO: 126197 - protein, 27 aa, Artificial Sequence
  Cyclic GFR-binding peptide
SATSMLYYDEYDKVVLRKHRVGRKPKV

SEQ ID NO: 126198 - protein, 27 aa, Artificial Sequence
  Cyclic GFR-binding peptide
SAISILYLIGKTPKILKNYQVGRKPKV

SEQ ID NO: 126199 - protein, 27 aa, Artificial Sequence
  Cyclic GFR-binding peptide
SAISMLYLDEYDKVVLKNYQVGRKPKV

SEQ ID NO: 126200 - protein, 27 aa, Artificial Sequence
  Cyclic GFR-binding peptide
SAISVLYLDDSSNVILKNYQVGRKPKV

SEQ ID NO: 126201 - protein, 27 aa, Artificial Sequence
  Cyclic GFR-binding peptide
VGRKPKVRYKKLIKPTKGIFYLISIAN

SEQ ID NO: 126202 - protein, 27 aa, Artificial Sequence
  Cyclic GFR-binding peptide
VGRKPKVNSLQEVVKDYEDYYLMTLPE

SEQ ID NO: 126203 - protein, 27 aa, Artificial Sequence
  Cyclic GFR-binding peptide
VGRKPKVNSLQEIKPTKGIYYVIPLPE

SEQ ID NO: 126204 - protein, 27 aa, Artificial Sequence
  Cyclic GFR-binding peptide
VGRKPKVNSLQEVKPKRGVYYLITLPE

SEQ ID NO: 126205 - protein, 27 aa, Artificial Sequence
  Cyclic GFR-binding peptide
VGRKPKVNSLQEVKPTRGVYYVIPLPE

SEQ ID NO: 126206 - protein, 27 aa, Artificial Sequence
  Cyclic GFR-binding peptide
VGRKPKVRYKKLVVKDYEDFYLMSIAN

SEQ ID NO: 126207 - protein, 27 aa, Artificial Sequence
  Cyclic GFR-binding peptide
VGRKPKVEYQKYIVNSSDDIFLVSIPS

SEQ ID NO: 126208 - protein, 27 aa, Artificial Sequence
  Cyclic GFR-binding peptide
VGRKPKVEYQKYVKPTRGVIFLISIPS

SEQ ID NO: 126209 - protein, 27 aa, Artificial Sequence
  Cyclic GFR-binding peptide
VGRKPKVNSLQEVVKENEDYYLMTLPE

SEQ ID NO: 126210 - protein, 27 aa, Artificial Sequence
  Cyclic GFR-binding peptide
VGRKPKVRYKKLVKPTRGVFYLISIAN

SEQ ID NO: 126211 - protein, 27 aa, Artificial Sequence
  Cyclic GFR-binding peptide
VGRKPKVNSLQEVVNNASDYYLITLPE

SEQ ID NO: 126212 - protein, 27 aa, Artificial Sequence
  Cyclic GFR-binding peptide
VGRKPKVNSLQEVKPKRGVYYVIPLPE

SEQ ID NO: 126213 - protein, 27 aa, Artificial Sequence
  Cyclic GFR-binding peptide
VGRKPKVNSLQEVVNNASDYYVIPLPE

SEQ ID NO: 126214 - protein, 27 aa, Artificial Sequence
  Cyclic GFR-binding peptide
VGRKPKVNSLQEVKPTRGVYYLITLPE

SEQ ID NO: 126215 - protein, 27 aa, Artificial Sequence
  Cyclic GFR-binding peptide
VGRKPKVQYNKLVKPTRGVLYLISIAS

SEQ ID NO: 126216 - protein, 27 aa, Artificial Sequence
  Cyclic GFR-binding peptide
VGRKPKVRYKKLVVKENEDFYLMSIAN

SEQ ID NO: 126217 - protein, 27 aa, Artificial Sequence
  Cyclic GFR-binding peptide
VGRKPKVEYQKYIKPTKGIIFLISIPS

SEQ ID NO: 126218 - protein, 27 aa, Artificial Sequence
  Cyclic GFR-binding peptide
VGRKPKVEYQKYVVNNASDIFLISIPS

SEQ ID NO: 126219 - protein, 27 aa, Artificial Sequence
  Cyclic GFR-binding peptide
VGRKPKVRYKKLVKPKRGVFYLISIAN

SEQ ID NO: 126220 - protein, 27 aa, Artificial Sequence
  Cyclic GFR-binding peptide
VGRKPKVNSLQEIVNSSDDYYVVPLPE

SEQ ID NO: 126221 - protein, 27 aa, Artificial Sequence
  Cyclic GFR-binding peptide
VGRKPKVNSLQEVVKDYEDYYVMPLPE

SEQ ID NO: 126222 - protein, 27 aa, Artificial Sequence
  Cyclic GFR-binding peptide
VGRKPKVQYNKLVVKENEDLYLMSIAS

SEQ ID NO: 126223 - protein, 27 aa, Artificial Sequence
  Cyclic GFR-binding peptide
VGRKPKVEYQKYVVKENEDIFLMSIPS

SEQ ID NO: 126224 - protein, 27 aa, Artificial Sequence
  Cyclic GFR-binding peptide
VGRKPKVQYNKLVKPKRGVLYLISIAS

SEQ ID NO: 126225 - protein, 27 aa, Artificial Sequence
  Cyclic GFR-binding peptide
VGRKPKVRYKKLIVNSSDDFYLVSIAN

SEQ ID NO: 126226 - protein, 27 aa, Artificial Sequence
  Cyclic GFR-binding peptide
VGRKPKVNSLQEVVKENEDYYVMPLPE

SEQ ID NO: 126227 - protein, 27 aa, Artificial Sequence
  Cyclic GFR-binding peptide
VGRKPKVEYQKYVVKDYEDIFLMSIPS

SEQ ID NO: 126228 - protein, 27 aa, Artificial Sequence
  Cyclic GFR-binding peptide
VGRKPKVQYNKLVVNNASDLYLISIAS

SEQ ID NO: 126229 - protein, 27 aa, Artificial Sequence
  Cyclic GFR-binding peptide
VGRKPKVQYNKLIKPTKGILYLISIAS

SEQ ID NO: 126230 - protein, 27 aa, Artificial Sequence
  Cyclic GFR-binding peptide
VGRKPKVNSLQEIKPTKGIYYLITLPE

SEQ ID NO: 126231 - protein, 27 aa, Artificial Sequence
  Cyclic GFR-binding peptide
VGRKPKVEYQKYVKPKRGVIFLISIPS

SEQ ID NO: 126232 - protein, 27 aa, Artificial Sequence
  Cyclic GFR-binding peptide
VGRKPKVQYNKLVVKDYEDLYLMSIAS

SEQ ID NO: 126233 - protein, 27 aa, Artificial Sequence
  Cyclic GFR-binding peptide
VGRKPKVRYKKLVVNNASDFYLISIAN

SEQ ID NO: 126234 - protein, 27 aa, Artificial Sequence
  Cyclic GFR-binding peptide
VGRKPKVNSLQEIVNSSDDYYLVTLPE

SEQ ID NO: 126235 - protein, 27 aa, Artificial Sequence
  Cyclic GFR-binding peptide
VGRKPKVQYNKLIVNSSDDLYLVSIAS

SEQ ID NO: 126236 - protein, 27 aa, Artificial Sequence
  Cyclic GFR-binding peptide
NAISILYFIGKTPKILKKYRVGRKPKV

SEQ ID NO: 126237 - protein, 27 aa, Artificial Sequence
  Cyclic GFR-binding peptide
EPLTMLYYDEYDKVVEQLSNVGRKPKV

SEQ ID NO: 126238 - protein, 27 aa, Artificial Sequence
  Cyclic GFR-binding peptide
EPLPIVYYIGKTPKIEQLSNVGRKPKV

SEQ ID NO: 126239 - protein, 27 aa, Artificial Sequence
  Cyclic GFR-binding peptide
EPLTILYYVGRKPKVEQLSNVGRKPKV

SEQ ID NO: 126240 - protein, 27 aa, Artificial Sequence
  Cyclic GFR-binding peptide
EPLPIVYYVGRTPKVEQLSNVGRKPKV

SEQ ID NO: 126241 - protein, 27 aa, Artificial Sequence
  Cyclic GFR-binding peptide
NAISMLYFDEYDKVVLKKYRVGRKPKV

SEQ ID NO: 126242 - protein, 27 aa, Artificial Sequence
  Cyclic GFR-binding peptide
SPISVLFIDDSSNVIYKQYEVGRKPKV

SEQ ID NO: 126243 - protein, 27 aa, Artificial Sequence
  Cyclic GFR-binding peptide
SPISILFIVGRTPKVYKQYEVGRKPKV

SEQ ID NO: 126244 - protein, 27 aa, Artificial Sequence
  Cyclic GFR-binding peptide
EPLTMLYYDENEKVVEQLSNVGRKPKV

SEQ ID NO: 126245 - protein, 27 aa, Artificial Sequence
  Cyclic GFR-binding peptide
NAISILYFVGRTPKVLKKYRVGRKPKV

SEQ ID NO: 126246 - protein, 27 aa, Artificial Sequence
  Cyclic GFR-binding peptide
EPLTILYYDSANNVVEQLSNVGRKPKV

SEQ ID NO: 126247 - protein, 27 aa, Artificial Sequence
  Cyclic GFR-binding peptide
EPLPIVYYVGRKPKVEQLSNVGRKPKV

SEQ ID NO: 126248 - protein, 27 aa, Artificial Sequence
  Cyclic GFR-binding peptide
EPLPIVYYDSANNVVEQLSNVGRKPKV

SEQ ID NO: 126249 - protein, 27 aa, Artificial Sequence
  Cyclic GFR-binding peptide
EPLTILYYVGRTPKVEQLSNVGRKPKV

SEQ ID NO: 126250 - protein, 27 aa, Artificial Sequence
  Cyclic GFR-binding peptide
SAISILYLVGRTPKVLKNYQVGRKPKV

SEQ ID NO: 126251 - protein, 27 aa, Artificial Sequence
  Cyclic GFR-binding peptide
NAISMLYFDENEKVVLKKYRVGRKPKV

SEQ ID NO: 126252 - protein, 27 aa, Artificial Sequence
  Cyclic GFR-binding peptide
SPISILFIIGKTPKIYKQYEVGRKPKV

SEQ ID NO: 126253 - protein, 27 aa, Artificial Sequence
  Cyclic GFR-binding peptide
SPISILFIDSANNVVYKQYEVGRKPKV

SEQ ID NO: 126254 - protein, 27 aa, Artificial Sequence
  Cyclic GFR-binding peptide
NAISILYFVGRKPKVLKKYRVGRKPKV

SEQ ID NO: 126255 - protein, 27 aa, Artificial Sequence
  Cyclic GFR-binding peptide
EPLPVVYYDDSSNVIEQLSNVGRKPKV

SEQ ID NO: 126256 - protein, 27 aa, Artificial Sequence
  Cyclic GFR-binding peptide
EPLPMVYYDEYDKVVEQLSNVGRKPKV

SEQ ID NO: 126257 - protein, 27 aa, Artificial Sequence
  Cyclic GFR-binding peptide
SAISMLYLDENEKVVLKNYQVGRKPKV

SEQ ID NO: 126258 - protein, 27 aa, Artificial Sequence
  Cyclic GFR-binding peptide
SPISMLFIDENEKVVYKQYEVGRKPKV

SEQ ID NO: 126259 - protein, 27 aa, Artificial Sequence
  Cyclic GFR-binding peptide
SAISILYLVGRKPKVLKNYQVGRKPKV

SEQ ID NO: 126260 - protein, 27 aa, Artificial Sequence
  Cyclic GFR-binding peptide
NAISVLYFDDSSNVILKKYRVGRKPKV

SEQ ID NO: 126261 - protein, 27 aa, Artificial Sequence
  Cyclic GFR-binding peptide
EPLPMVYYDENEKVVEQLSNVGRKPKV

SEQ ID NO: 126262 - protein, 27 aa, Artificial Sequence
  Cyclic GFR-binding peptide
SPISMLFIDEYDKVVYKQYEVGRKPKV

SEQ ID NO: 126263 - protein, 27 aa, Artificial Sequence
  Cyclic GFR-binding peptide
SAISILYLDSANNVVLKNYQVGRKPKV

SEQ ID NO: 126264 - protein, 27 aa, Artificial Sequence
  Cyclic GFR-binding peptide
SAISILYLIGKTPKILKNYQVGRKPKV

SEQ ID NO: 126265 - protein, 27 aa, Artificial Sequence
  Cyclic GFR-binding peptide
EPLTILYYIGKTPKIEQLSNVGRKPKV

SEQ ID NO: 126266 - protein, 27 aa, Artificial Sequence
  Cyclic GFR-binding peptide
SPISILFIVGRKPKVYKQYEVGRKPKV

SEQ ID NO: 126267 - protein, 27 aa, Artificial Sequence
  Cyclic GFR-binding peptide
SAISMLYLDEYDKVVLKNYQVGRKPKV

SEQ ID NO: 126268 - protein, 27 aa, Artificial Sequence
  Cyclic GFR-binding peptide
NAISILYFDSANNVVLKKYRVGRKPKV

SEQ ID NO: 126269 - protein, 27 aa, Artificial Sequence
  Cyclic GFR-binding peptide
EPLTVLYYDDSSNVIEQLSNVGRKPKV

SEQ ID NO: 126270 - protein, 27 aa, Artificial Sequence
  Cyclic GFR-binding peptide
SAISVLYLDDSSNVILKNYQVGRKPKV

SEQ ID NO: 126271 - protein, 29 aa, Artificial Sequence
  Cyclic GFR-binding peptide
VGRKPKVVTAKKLKPKKRVYEIKRVQVPR

SEQ ID NO: 126272 - protein, 29 aa, Artificial Sequence
  Cyclic GFR-binding peptide
VGRKPKVVQVEKLKPKKRVYEVKAVKVSR

SEQ ID NO: 126273 - protein, 29 aa, Artificial Sequence
  Cyclic GFR-binding peptide
VGRKPKVVQVEKFIPKKRVIEVKAVKVSR

SEQ ID NO: 126274 - protein, 29 aa, Artificial Sequence
  Cyclic GFR-binding peptide
VGRKPKVVQVEKHQGQHPKIRVKAMKVSR

SEQ ID NO: 126275 - protein, 29 aa, Artificial Sequence
  Cyclic GFR-binding peptide
VGRKPKVVTAKKHQGQHPKIRIKRMQVPR

SEQ ID NO: 126276 - protein, 29 aa, Artificial Sequence
  Cyclic GFR-binding peptide
VGRKPKVSMEGLLKPKKRVYEMIQVTINS

SEQ ID NO: 126277 - protein, 29 aa, Artificial Sequence
  Cyclic GFR-binding peptide
VGRKPKVSMEGIFIPKKRVIEMIQVTINS

SEQ ID NO: 126278 - protein, 29 aa, Artificial Sequence
  Cyclic GFR-binding peptide
VGRKPKVSMEGLHQGQHPKIRMIQMTINS

SEQ ID NO: 126279 - protein, 29 aa, Artificial Sequence
  Cyclic GFR-binding peptide
VGRKPKVSMEGILKPKKRVYEMIQVTINS

SEQ ID NO: 126280 - protein, 29 aa, Artificial Sequence
  Cyclic GFR-binding peptide
VGRKPKVSMEGLFIPKKRVIEMIQVTINS

SEQ ID NO: 126281 - protein, 29 aa, Artificial Sequence
  Cyclic GFR-binding peptide
VGRKPKVVTAKKFIPKKRVIEIKRVQVPR

SEQ ID NO: 126282 - protein, 29 aa, Artificial Sequence
  Cyclic GFR-binding peptide
VGRKPKVSMEGIHQGQHPKIRMIQMTINS

SEQ ID NO: 126283 - protein, 29 aa, Artificial Sequence
  Cyclic GFR-binding peptide
RPVQVRKIEYVRKKPKLKKATVVGRKPKV

SEQ ID NO: 126284 - protein, 29 aa, Artificial Sequence
  Cyclic GFR-binding peptide
RSVKVAKVEYVRKKPKLKEVQVVGRKPKV

SEQ ID NO: 126285 - protein, 29 aa, Artificial Sequence
  Cyclic GFR-binding peptide
RSVKVAKVEIVRKKPIFKEVQVVGRKPKV

SEQ ID NO: 126286 - protein, 29 aa, Artificial Sequence
  Cyclic GFR-binding peptide
RSVKMAKVRIKPHQGQHKEVQVVGRKPKV

SEQ ID NO: 126287 - protein, 29 aa, Artificial Sequence
  Cyclic GFR-binding peptide
RPVQMRKIRIKPHQGQHKKATVVGRKPKV

SEQ ID NO: 126288 - protein, 29 aa, Artificial Sequence
  Cyclic GFR-binding peptide
SNITVQIMEYVRKKPKLLGEMSVGRKPKV

SEQ ID NO: 126289 - protein, 29 aa, Artificial Sequence
  Cyclic GFR-binding peptide
SNITVQIMEIVRKKPIFIGEMSVGRKPKV

SEQ ID NO: 126290 - protein, 29 aa, Artificial Sequence
  Cyclic GFR-binding peptide
SNITMQIMRIKPHQGQHLGEMSVGRKPKV

SEQ ID NO: 126291 - protein, 29 aa, Artificial Sequence
  Cyclic GFR-binding peptide
SNITVQIMEYVRKKPKLIGEMSVGRKPKV

SEQ ID NO: 126292 - protein, 29 aa, Artificial Sequence
  Cyclic GFR-binding peptide
SNITVQIMEIVRKKPIFLGEMSVGRKPKV

SEQ ID NO: 126293 - protein, 29 aa, Artificial Sequence
  Cyclic GFR-binding peptide
RPVQVRKIEIVRKKPIFKKATVVGRKPKV

SEQ ID NO: 126294 - protein, 29 aa, Artificial Sequence
  Cyclic GFR-binding peptide
SNITMQIMRIKPHQGQHIGEMSVGRKPKV

SEQ ID NO: 126295 - protein, 29 aa, Artificial Sequence
  Cyclic GFR-binding peptide
VGRKPKVVTAKKLKPKKRVYEIKRVQVPR

SEQ ID NO: 126296 - protein, 29 aa, Artificial Sequence
  Cyclic GFR-binding peptide
VGRKPKVVQVEKLKPKKRVYEVKAVKVSR

SEQ ID NO: 126297 - protein, 29 aa, Artificial Sequence
  Cyclic GFR-binding peptide
VGRKPKVVQVEKFIPKKRVIEVKAVKVSR

SEQ ID NO: 126298 - protein, 29 aa, Artificial Sequence
  Cyclic GFR-binding peptide
VGRKPKVVQVEKHQGQHPKIRVKAMKVSR

SEQ ID NO: 126299 - protein, 29 aa, Artificial Sequence
  Cyclic GFR-binding peptide
VGRKPKVVTAKKHQGQHPKIRIKRMQVPR

SEQ ID NO: 126300 - protein, 29 aa, Artificial Sequence
  Cyclic GFR-binding peptide
VGRKPKVSMEGLLKPKKRVYEMIQVTINS

SEQ ID NO: 126301 - protein, 29 aa, Artificial Sequence
  Cyclic GFR-binding peptide
VGRKPKVSMEGIFIPKKRVIEMIQVTINS

SEQ ID NO: 126302 - protein, 29 aa, Artificial Sequence
  Cyclic GFR-binding peptide
VGRKPKVSMEGLHQGQHPKIRMIQMTINS

SEQ ID NO: 126303 - protein, 29 aa, Artificial Sequence
  Cyclic GFR-binding peptide
VGRKPKVSMEGILKPKKRVYEMIQVTINS

SEQ ID NO: 126304 - protein, 29 aa, Artificial Sequence
  Cyclic GFR-binding peptide
VGRKPKVSMEGLFIPKKRVIEMIQVTINS

SEQ ID NO: 126305 - protein, 29 aa, Artificial Sequence
  Cyclic GFR-binding peptide
VGRKPKVVTAKKFIPKKRVIEIKRVQVPR

SEQ ID NO: 126306 - protein, 29 aa, Artificial Sequence
  Cyclic GFR-binding peptide
VGRKPKVSMEGIHQGQHPKIRMIQMTINS

SEQ ID NO: 126307 - protein, 29 aa, Artificial Sequence
  Cyclic GFR-binding peptide
RPVQVRKIEYVRKKPKLKKATVVGRKPKV

SEQ ID NO: 126308 - protein, 29 aa, Artificial Sequence
  Cyclic GFR-binding peptide
RSVKVAKVEYVRKKPKLKEVQVVGRKPKV

SEQ ID NO: 126309 - protein, 29 aa, Artificial Sequence
  Cyclic GFR-binding peptide
RSVKVAKVEIVRKKPIFKEVQVVGRKPKV

SEQ ID NO: 126310 - protein, 29 aa, Artificial Sequence
  Cyclic GFR-binding peptide
RSVKMAKVRIKPHQGQHKEVQVVGRKPKV

SEQ ID NO: 126311 - protein, 29 aa, Artificial Sequence
  Cyclic GFR-binding peptide
RPVQMRKIRIKPHQGQHKKATVVGRKPKV

SEQ ID NO: 126312 - protein, 29 aa, Artificial Sequence
  Cyclic GFR-binding peptide
SNITVQIMEYVRKKPKLLGEMSVGRKPKV

SEQ ID NO: 126313 - protein, 29 aa, Artificial Sequence
  Cyclic GFR-binding peptide
SNITVQIMEIVRKKPIFIGEMSVGRKPKV

SEQ ID NO: 126314 - protein, 29 aa, Artificial Sequence
  Cyclic GFR-binding peptide
SNITMQIMRIKPHQGQHLGEMSVGRKPKV

SEQ ID NO: 126315 - protein, 29 aa, Artificial Sequence
  Cyclic GFR-binding peptide
SNITVQIMEYVRKKPKLIGEMSVGRKPKV

SEQ ID NO: 126316 - protein, 29 aa, Artificial Sequence
  Cyclic GFR-binding peptide
SNITVQIMEIVRKKPIFLGEMSVGRKPKV

SEQ ID NO: 126317 - protein, 29 aa, Artificial Sequence
  Cyclic GFR-binding peptide
RPVQVRKIEIVRKKPIFKKATVVGRKPKV

SEQ ID NO: 126318 - protein, 29 aa, Artificial Sequence
  Cyclic GFR-binding peptide
SNITMQIMRIKPHQGQHIGEMSVGRKPKV

SEQ ID NO: 126319 - protein, 27 aa, Artificial Sequence
  Cyclic GFR-binding peptide
VGRKPKVEYQKYVVKENEDIYLMSIPS

SEQ ID NO: 126320 - protein, 27 aa, Artificial Sequence
  Cyclic GFR-binding peptide
VGRKPKVRYKKLIKPTKGIFYLISIAN

SEQ ID NO: 126321 - protein, 27 aa, Artificial Sequence
  Cyclic GFR-binding peptide
VGRKPKVEYKFKVKPTRGVLYLISIPE

SEQ ID NO: 126322 - protein, 27 aa, Artificial Sequence
  Cyclic GFR-binding peptide
VGRKPKVYHYKLVVKDYEDKYLMSIPS

SEQ ID NO: 126323 - protein, 27 aa, Artificial Sequence
  Cyclic GFR-binding peptide
VGRKPKVEYKFKTPVGMDDLYLVSIPE

SEQ ID NO: 126324 - protein, 27 aa, Artificial Sequence
  Cyclic GFR-binding peptide
VGRKPKVEYQKYVKPKRGVIYLISIPS

SEQ ID NO: 126325 - protein, 27 aa, Artificial Sequence
  Cyclic GFR-binding peptide
VGRKPKVRYKKLVVKDYEDFYLMSIAN

SEQ ID NO: 126326 - protein, 27 aa, Artificial Sequence
  Cyclic GFR-binding peptide
VGRKPKVEYQKYVVKDYEDIYLMSIPS

SEQ ID NO: 126327 - protein, 27 aa, Artificial Sequence
  Cyclic GFR-binding peptide
VGRKPKVRYKKLVKPTRGVFYLISIAN

SEQ ID NO: 126328 - protein, 27 aa, Artificial Sequence
  Cyclic GFR-binding peptide
VGRKPKVYHYKLIKPTKGIKYLISIPS

SEQ ID NO: 126329 - protein, 27 aa, Artificial Sequence
  Cyclic GFR-binding peptide
VGRKPKVYHYKLVVKENEDKYLMSIPS

SEQ ID NO: 126330 - protein, 27 aa, Artificial Sequence
  Cyclic GFR-binding peptide
VGRKPKVYHYKLVKPKRGVKYLISIPS

SEQ ID NO: 126331 - protein, 27 aa, Artificial Sequence
  Cyclic GFR-binding peptide
VGRKPKVEYKFKIKPTKGILYLISIPE

SEQ ID NO: 126332 - protein, 27 aa, Artificial Sequence
  Cyclic GFR-binding peptide
VGRKPKVEYQKYIKPTKGIIYLISIPS

SEQ ID NO: 126333 - protein, 27 aa, Artificial Sequence
  Cyclic GFR-binding peptide
VGRKPKVRYKKLVVKENEDFYLMSIAN

SEQ ID NO: 126334 - protein, 27 aa, Artificial Sequence
  Cyclic GFR-binding peptide
VGRKPKVRYKKLVVNNAADFYLISIAN

SEQ ID NO: 126335 - protein, 27 aa, Artificial Sequence
  Cyclic GFR-binding peptide
VGRKPKVYHYKLYTVVGKDKYLISIPS

SEQ ID NO: 126336 - protein, 27 aa, Artificial Sequence
  Cyclic GFR-binding peptide
VGRKPKVRYKKLTPVGMDDFYLVSIAN

SEQ ID NO: 126337 - protein, 27 aa, Artificial Sequence
  Cyclic GFR-binding peptide
VGRKPKVRYKKLVKPKRGVFYLISIAN

SEQ ID NO: 126338 - protein, 27 aa, Artificial Sequence
  Cyclic GFR-binding peptide
VGRKPKVYHYKLVVNNAADKYLISIPS

SEQ ID NO: 126339 - protein, 27 aa, Artificial Sequence
  Cyclic GFR-binding peptide
VGRKPKVYHYKLIVNSSDDKYLVSIPS

SEQ ID NO: 126340 - protein, 27 aa, Artificial Sequence
  Cyclic GFR-binding peptide
VGRKPKVRYKKLIVNNSSDFYLVSIAN

SEQ ID NO: 126341 - protein, 27 aa, Artificial Sequence
  Cyclic GFR-binding peptide
VGRKPKVRYKKLYTVVGKDFYLISIAN

SEQ ID NO: 126342 - protein, 27 aa, Artificial Sequence
  Cyclic GFR-binding peptide
VGRKPKVEYQKYVVNNAADIYLISIPS

SEQ ID NO: 126343 - protein, 27 aa, Artificial Sequence
  Cyclic GFR-binding peptide
VGRKPKVRYKKLIVNSSDDFYLVSIAN

SEQ ID NO: 126344 - protein, 27 aa, Artificial Sequence
  Cyclic GFR-binding peptide
VGRKPKVEYKFKIVNNSSDLYLVSIPE

SEQ ID NO: 126345 - protein, 27 aa, Artificial Sequence
  Cyclic GFR-binding peptide
VGRKPKVEYQKYVKPTRGVIYLISIPS

SEQ ID NO: 126346 - protein, 27 aa, Artificial Sequence
  Cyclic GFR-binding peptide
VGRKPKVEYQKYIVNSSDDIYLVSIPS

SEQ ID NO: 126347 - protein, 27 aa, Artificial Sequence
  Cyclic GFR-binding peptide
VGRKPKVYHYKLTPVGMDDKYLVSIPS

SEQ ID NO: 126348 - protein, 27 aa, Artificial Sequence
  Cyclic GFR-binding peptide
VGRKPKVYHYKLIVNNSSDKYLVSIPS

SEQ ID NO: 126349 - protein, 27 aa, Artificial Sequence
  Cyclic GFR-binding peptide
VGRKPKVEYKFKIVNSSDDLYLVSIPE

SEQ ID NO: 126350 - protein, 27 aa, Artificial Sequence
  Cyclic GFR-binding peptide
VGRKPKVYHYKLVKPTRGVKYLISIPS

SEQ ID NO: 126351 - protein, 27 aa, Artificial Sequence
  Cyclic GFR-binding peptide
VGRKPKVEYKFKVKPKRGVLYLISIPE

SEQ ID NO: 126352 - protein, 27 aa, Artificial Sequence
  Cyclic GFR-binding peptide
VGRKPKVEYQKYYTVVGKDIYLISIPS

SEQ ID NO: 126353 - protein, 27 aa, Artificial Sequence
  Cyclic GFR-binding peptide
VGRKPKVEYKFKVVKENEDLYLMSIPE

SEQ ID NO: 126354 - protein, 27 aa, Artificial Sequence
  Cyclic GFR-binding peptide
VGRKPKVEYQKYTPVGMDDIYLVSIPS

SEQ ID NO: 126355 - protein, 27 aa, Artificial Sequence
  Cyclic GFR-binding peptide
VGRKPKVEYQKYIVNNSSDIYLVSIPS

SEQ ID NO: 126356 - protein, 27 aa, Artificial Sequence
  Cyclic GFR-binding peptide
VGRKPKVEYKFKVVKDYEDLYLMSIPE

SEQ ID NO: 126357 - protein, 27 aa, Artificial Sequence
  Cyclic GFR-binding peptide
VGRKPKVEYKFKYTVVGKDLYLISIPE

SEQ ID NO: 126358 - protein, 27 aa, Artificial Sequence
  Cyclic GFR-binding peptide
VGRKPKVEYKFKVVNNAADLYLISIPE

SEQ ID NO: 126359 - protein, 27 aa, Artificial Sequence
  Cyclic GFR-binding peptide
SPISMLYIDENEKVVYKQYEVGRKPKV

SEQ ID NO: 126360 - protein, 27 aa, Artificial Sequence
  Cyclic GFR-binding peptide
NAISILYFIGKTPKILKKYRVGRKPKV

SEQ ID NO: 126361 - protein, 27 aa, Artificial Sequence
  Cyclic GFR-binding peptide
EPISILYLVGRTPKVKFKYEVGRKPKV

SEQ ID NO: 126362 - protein, 27 aa, Artificial Sequence
  Cyclic GFR-binding peptide
SPISMLYKDEYDKVVLKYHYVGRKPKV

SEQ ID NO: 126363 - protein, 27 aa, Artificial Sequence
  Cyclic GFR-binding peptide
EPISVLYLDDMGVPTKFKYEVGRKPKV

SEQ ID NO: 126364 - protein, 27 aa, Artificial Sequence
  Cyclic GFR-binding peptide
SPISILYIVGRKPKVYKQYEVGRKPKV

SEQ ID NO: 126365 - protein, 27 aa, Artificial Sequence
  Cyclic GFR-binding peptide
NAISMLYFDEYDKVVLKKYRVGRKPKV

SEQ ID NO: 126366 - protein, 27 aa, Artificial Sequence
  Cyclic GFR-binding peptide
SPISMLYIDEYDKVVYKQYEVGRKPKV

SEQ ID NO: 126367 - protein, 27 aa, Artificial Sequence
  Cyclic GFR-binding peptide
NAISILYFVGRTPKVLKKYRVGRKPKV

SEQ ID NO: 126368 - protein, 27 aa, Artificial Sequence
  Cyclic GFR-binding peptide
SPISILYKIGKTPKILKYHYVGRKPKV

SEQ ID NO: 126369 - protein, 27 aa, Artificial Sequence
  Cyclic GFR-binding peptide
SPISMLYKDENEKVVLKYHYVGRKPKV

SEQ ID NO: 126370 - protein, 27 aa, Artificial Sequence
  Cyclic GFR-binding peptide
SPISILYKVGRKPKVLKYHYVGRKPKV

SEQ ID NO: 126371 - protein, 27 aa, Artificial Sequence
  Cyclic GFR-binding peptide
EPISILYLIGKTPKIKFKYEVGRKPKV

SEQ ID NO: 126372 - protein, 27 aa, Artificial Sequence
  Cyclic GFR-binding peptide
SPISILYIIGKTPKIYKQYEVGRKPKV

SEQ ID NO: 126373 - protein, 27 aa, Artificial Sequence
  Cyclic GFR-binding peptide
NAISMLYFDENEKVVLKKYRVGRKPKV

SEQ ID NO: 126374 - protein, 27 aa, Artificial Sequence
  Cyclic GFR-binding peptide
NAISILYFDAANNVVLKKYRVGRKPKV

SEQ ID NO: 126375 - protein, 27 aa, Artificial Sequence
  Cyclic GFR-binding peptide
SPISILYKDKGVVTYLKYHYVGRKPKV

SEQ ID NO: 126376 - protein, 27 aa, Artificial Sequence
  Cyclic GFR-binding peptide
NAISVLYFDDMGVPTLKKYRVGRKPKV

SEQ ID NO: 126377 - protein, 27 aa, Artificial Sequence
  Cyclic GFR-binding peptide
NAISILYFVGRKPKVLKKYRVGRKPKV

SEQ ID NO: 126378 - protein, 27 aa, Artificial Sequence
  Cyclic GFR-binding peptide
SPISILYKDAANNVVLKYHYVGRKPKV

SEQ ID NO: 126379 - protein, 27 aa, Artificial Sequence
  Cyclic GFR-binding peptide
SPISVLYKDDSSNVILKYHYVGRKPKV

SEQ ID NO: 126380 - protein, 27 aa, Artificial Sequence
  Cyclic GFR-binding peptide
NAISVLYFDSSNNVILKKYRVGRKPKV

SEQ ID NO: 126381 - protein, 27 aa, Artificial Sequence
  Cyclic GFR-binding peptide
NAISILYFDKGVVTYLKKYRVGRKPKV

SEQ ID NO: 126382 - protein, 27 aa, Artificial Sequence
  Cyclic GFR-binding peptide
SPISILYIDAANNVVYKQYEVGRKPKV

SEQ ID NO: 126383 - protein, 27 aa, Artificial Sequence
  Cyclic GFR-binding peptide
NAISVLYFDDSSNVILKKYRVGRKPKV

SEQ ID NO: 126384 - protein, 27 aa, Artificial Sequence
  Cyclic GFR-binding peptide
EPISVLYLDSSNNVIKFKYEVGRKPKV

SEQ ID NO: 126385 - protein, 27 aa, Artificial Sequence
  Cyclic GFR-binding peptide
SPISILYIVGRTPKVYKQYEVGRKPKV

SEQ ID NO: 126386 - protein, 27 aa, Artificial Sequence
  Cyclic GFR-binding peptide
SPISVLYIDDSSNVIYKQYEVGRKPKV

SEQ ID NO: 126387 - protein, 27 aa, Artificial Sequence
  Cyclic GFR-binding peptide
SPISVLYKDDMGVPTLKYHYVGRKPKV

SEQ ID NO: 126388 - protein, 27 aa, Artificial Sequence
  Cyclic GFR-binding peptide
SPISVLYKDSSNNVILKYHYVGRKPKV

SEQ ID NO: 126389 - protein, 27 aa, Artificial Sequence
  Cyclic GFR-binding peptide
EPISVLYLDDSSNVIKFKYEVGRKPKV

SEQ ID NO: 126390 - protein, 27 aa, Artificial Sequence
  Cyclic GFR-binding peptide
SPISILYKVGRTPKVLKYHYVGRKPKV

SEQ ID NO: 126391 - protein, 27 aa, Artificial Sequence
  Cyclic GFR-binding peptide
EPISILYLVGRKPKVKFKYEVGRKPKV

SEQ ID NO: 126392 - protein, 27 aa, Artificial Sequence
  Cyclic GFR-binding peptide
SPISILYIDKGVVTYYKQYEVGRKPKV

SEQ ID NO: 126393 - protein, 27 aa, Artificial Sequence
  Cyclic GFR-binding peptide
EPISMLYLDENEKVVKFKYEVGRKPKV

SEQ ID NO: 126394 - protein, 27 aa, Artificial Sequence
  Cyclic GFR-binding peptide
SPISVLYIDDMGVPTYKQYEVGRKPKV

SEQ ID NO: 126395 - protein, 27 aa, Artificial Sequence
  Cyclic GFR-binding peptide
SPISVLYIDSSNNVIYKQYEVGRKPKV

SEQ ID NO: 126396 - protein, 27 aa, Artificial Sequence
  Cyclic GFR-binding peptide
EPISMLYLDEYDKVVKFKYEVGRKPKV

SEQ ID NO: 126397 - protein, 27 aa, Artificial Sequence
  Cyclic GFR-binding peptide
EPISILYLDKGVVTYKFKYEVGRKPKV

SEQ ID NO: 126398 - protein, 27 aa, Artificial Sequence
  Cyclic GFR-binding peptide
EPISILYLDAANNVVKFKYEVGRKPKV

SEQ ID NO: 126399 - protein, 27 aa, Artificial Sequence
  Cyclic GFR-binding peptide
VGRKPKVPIKGYIIQQKDNFYLMNIPS

SEQ ID NO: 126400 - protein, 27 aa, Artificial Sequence
  Cyclic GFR-binding peptide
VGRKPKVPIKGYVVKDYEDFYLMNIPS

SEQ ID NO: 126401 - protein, 27 aa, Artificial Sequence
  Cyclic GFR-binding peptide
VGRKPKVPIKGYIVNSSDDFYLVNIPS

SEQ ID NO: 126402 - protein, 27 aa, Artificial Sequence
  Cyclic GFR-binding peptide
VGRKPKVPIKGYLLVRGNDFYLMNIPS

SEQ ID NO: 126403 - protein, 27 aa, Artificial Sequence
  Cyclic GFR-binding peptide
VGRKPKVPIKGYVVNNAADFYLINIPS

SEQ ID NO: 126404 - protein, 27 aa, Artificial Sequence
  Cyclic GFR-binding peptide
VGRKPKVPIKGYVVKENEDFYLMNIPS

SEQ ID NO: 126405 - protein, 27 aa, Artificial Sequence
  Cyclic GFR-binding peptide
VGRKPKVPIKGYVVNNASDFYLINIPS

SEQ ID NO: 126406 - protein, 27 aa, Artificial Sequence
  Cyclic GFR-binding peptide
VGRKPKVPIKGYYTVVGKDFYLINIPS

SEQ ID NO: 126407 - protein, 27 aa, Artificial Sequence
  Cyclic GFR-binding peptide
VGRKPKVPIKGYTPVGMDDFYLVNIPS

SEQ ID NO: 126408 - protein, 27 aa, Artificial Sequence
  Cyclic GFR-binding peptide
VGRKPKVPIKGYIVNNSSDFYLVNIPS

SEQ ID NO: 126409 - protein, 27 aa, Artificial Sequence
  Cyclic GFR-binding peptide
SPINMLYFNDKQQIIYGKIPVGRKPKV

SEQ ID NO: 126410 - protein, 27 aa, Artificial Sequence
  Cyclic GFR-binding peptide
SPINMLYFDEYDKVVYGKIPVGRKPKV

SEQ ID NO: 126411 - protein, 27 aa, Artificial Sequence
  Cyclic GFR-binding peptide
SPINVLYFDDSSNVIYGKIPVGRKPKV

SEQ ID NO: 126412 - protein, 27 aa, Artificial Sequence
  Cyclic GFR-binding peptide
SPINMLYFDNGRVLLYGKIPVGRKPKV

SEQ ID NO: 126413 - protein, 27 aa, Artificial Sequence
  Cyclic GFR-binding peptide
SPINILYFDAANNVVYGKIPVGRKPKV

SEQ ID NO: 126414 - protein, 27 aa, Artificial Sequence
  Cyclic GFR-binding peptide
SPINMLYFDENEKVVYGKIPVGRKPKV

SEQ ID NO: 126415 - protein, 27 aa, Artificial Sequence
  Cyclic GFR-binding peptide
SPINILYFDSANNVVYGKIPVGRKPKV

SEQ ID NO: 126416 - protein, 27 aa, Artificial Sequence
  Cyclic GFR-binding peptide
SPINILYFDKGVVTYYGKIPVGRKPKV

SEQ ID NO: 126417 - protein, 27 aa, Artificial Sequence
  Cyclic GFR-binding peptide
SPINVLYFDDMGVPTYGKIPVGRKPKV

SEQ ID NO: 126418 - protein, 27 aa, Artificial Sequence
  Cyclic GFR-binding peptide
SPINVLYFDSSNNVIYGKIPVGRKPKV

SEQ ID NO: 126419 - protein, 27 aa, Artificial Sequence
  Cyclic GFR-binding peptide
VGRKPKVPIKGYIIQQKDNFYLMNIPS

SEQ ID NO: 126420 - protein, 27 aa, Artificial Sequence
  Cyclic GFR-binding peptide
VGRKPKVPIKGYVVKDYEDFYLMNIPS

SEQ ID NO: 126421 - protein, 27 aa, Artificial Sequence
  Cyclic GFR-binding peptide
VGRKPKVPIKGYIVNSSDDFYLVNIPS

SEQ ID NO: 126422 - protein, 27 aa, Artificial Sequence
  Cyclic GFR-binding peptide
VGRKPKVPIKGYLLVRGNDFYLMNIPS

SEQ ID NO: 126423 - protein, 27 aa, Artificial Sequence
  Cyclic GFR-binding peptide
VGRKPKVPIKGYVVNNAADFYLINIPS

SEQ ID NO: 126424 - protein, 27 aa, Artificial Sequence
  Cyclic GFR-binding peptide
VGRKPKVPIKGYVVKENEDFYLMNIPS

SEQ ID NO: 126425 - protein, 27 aa, Artificial Sequence
  Cyclic GFR-binding peptide
VGRKPKVPIKGYVVNNASDFYLINIPS

SEQ ID NO: 126426 - protein, 27 aa, Artificial Sequence
  Cyclic GFR-binding peptide
VGRKPKVPIKGYYTVVGKDFYLINIPS

SEQ ID NO: 126427 - protein, 27 aa, Artificial Sequence
  Cyclic GFR-binding peptide
VGRKPKVPIKGYTPVGMDDFYLVNIPS

SEQ ID NO: 126428 - protein, 27 aa, Artificial Sequence
  Cyclic GFR-binding peptide
VGRKPKVPIKGYIVNNSSDFYLVNIPS

SEQ ID NO: 126429 - protein, 27 aa, Artificial Sequence
  Cyclic GFR-binding peptide
SPINMLYFNDKQQIIYGKIPVGRKPKV

SEQ ID NO: 126430 - protein, 27 aa, Artificial Sequence
  Cyclic GFR-binding peptide
SPINMLYFDEYDKVVYGKIPVGRKPKV

SEQ ID NO: 126431 - protein, 27 aa, Artificial Sequence
  Cyclic GFR-binding peptide
SPINVLYFDDSSNVIYGKIPVGRKPKV

SEQ ID NO: 126432 - protein, 27 aa, Artificial Sequence
  Cyclic GFR-binding peptide
SPINMLYFDNGRVLLYGKIPVGRKPKV

SEQ ID NO: 126433 - protein, 27 aa, Artificial Sequence
  Cyclic GFR-binding peptide
SPINILYFDAANNVVYGKIPVGRKPKV

SEQ ID NO: 126434 - protein, 27 aa, Artificial Sequence
  Cyclic GFR-binding peptide
SPINMLYFDENEKVVYGKIPVGRKPKV

SEQ ID NO: 126435 - protein, 27 aa, Artificial Sequence
  Cyclic GFR-binding peptide
SPINILYFDSANNVVYGKIPVGRKPKV

SEQ ID NO: 126436 - protein, 27 aa, Artificial Sequence
  Cyclic GFR-binding peptide
SPINILYFDKGVVTYYGKIPVGRKPKV

SEQ ID NO: 126437 - protein, 27 aa, Artificial Sequence
  Cyclic GFR-binding peptide
SPINVLYFDDMGVPTYGKIPVGRKPKV

SEQ ID NO: 126438 - protein, 27 aa, Artificial Sequence
  Cyclic GFR-binding peptide
SPINVLYFDSSNNVIYGKIPVGRKPKV

SEQ ID NO: 126439 - protein, 27 aa, Artificial Sequence
  Cyclic GFR-binding peptide
VGRKPKVRYKKLIKPTKGIFYLISIAN

SEQ ID NO: 126440 - protein, 27 aa, Artificial Sequence
  Cyclic GFR-binding peptide
VGRKPKVRYKKLVVKDYEDFYLMSIAN

SEQ ID NO: 126441 - protein, 27 aa, Artificial Sequence
  Cyclic GFR-binding peptide
VGRKPKVRYKKLVKPTRGVFYLISIAN

SEQ ID NO: 126442 - protein, 27 aa, Artificial Sequence
  Cyclic GFR-binding peptide
VGRKPKVRYKKLVVKENEDFYLMSIAN

SEQ ID NO: 126443 - protein, 27 aa, Artificial Sequence
  Cyclic GFR-binding peptide
VGRKPKVRYKKLVKPKRGVFYLISIAN

SEQ ID NO: 126444 - protein, 27 aa, Artificial Sequence
  Cyclic GFR-binding peptide
VGRKPKVRYKKLIVNSSDDFYLVSIAN

SEQ ID NO: 126445 - protein, 27 aa, Artificial Sequence
  Cyclic GFR-binding peptide
VGRKPKVRYKKLVVNNASDFYLISIAN

SEQ ID NO: 126446 - protein, 27 aa, Artificial Sequence
  Cyclic GFR-binding peptide
NAISILYFIGKTPKILKKYRVGRKPKV

SEQ ID NO: 126447 - protein, 27 aa, Artificial Sequence
  Cyclic GFR-binding peptide
NAISMLYFDEYDKVVLKKYRVGRKPKV

SEQ ID NO: 126448 - protein, 27 aa, Artificial Sequence
  Cyclic GFR-binding peptide
NAISILYFVGRTPKVLKKYRVGRKPKV

SEQ ID NO: 126449 - protein, 27 aa, Artificial Sequence
  Cyclic GFR-binding peptide
NAISMLYFDENEKVVLKKYRVGRKPKV

SEQ ID NO: 126450 - protein, 27 aa, Artificial Sequence
  Cyclic GFR-binding peptide
NAISILYFVGRKPKVLKKYRVGRKPKV

SEQ ID NO: 126451 - protein, 27 aa, Artificial Sequence
  Cyclic GFR-binding peptide
NAISVLYFDDSSNVILKKYRVGRKPKV

SEQ ID NO: 126452 - protein, 27 aa, Artificial Sequence
  Cyclic GFR-binding peptide
NAISILYFDSANNVVLKKYRVGRKPKV

SEQ ID NO: 126453 - protein, 27 aa, Artificial Sequence
  Cyclic GFR-binding peptide
VGRKPKVEYQKYVVKENEDIYLMSIPS

SEQ ID NO: 126454 - protein, 27 aa, Artificial Sequence
  Cyclic GFR-binding peptide
VGRKPKVNSLQEVVKDYEDYYLMTLPE

SEQ ID NO: 126455 - protein, 27 aa, Artificial Sequence
  Cyclic GFR-binding peptide
VGRKPKVEYQKYVVKENEDIFLMSIPS

SEQ ID NO: 126456 - protein, 27 aa, Artificial Sequence
  Cyclic GFR-binding peptide
VGRKPKVNSLQEIKPTKGIYYVIPLPE

SEQ ID NO: 126457 - protein, 27 aa, Artificial Sequence
  Cyclic GFR-binding peptide
VGRKPKVNSLQEVKPKRGVYYLITLPE

SEQ ID NO: 126458 - protein, 27 aa, Artificial Sequence
  Cyclic GFR-binding peptide
VGRKPKVEYQKYVVNNAADIYLISIPS

SEQ ID NO: 126459 - protein, 27 aa, Artificial Sequence
  Cyclic GFR-binding peptide
VGRKPKVNSLQEVKPTRGVYYVIPLPE

SEQ ID NO: 126460 - protein, 27 aa, Artificial Sequence
  Cyclic GFR-binding peptide
VGRKPKVEYQKYIVNSSDDIFLVSIPS

SEQ ID NO: 126461 - protein, 27 aa, Artificial Sequence
  Cyclic GFR-binding peptide
VGRKPKVEYQKYVKPTRGVIFLISIPS

SEQ ID NO: 126462 - protein, 27 aa, Artificial Sequence
  Cyclic GFR-binding peptide
VGRKPKVEYQKYVVKDYEDIYLMSIPS

SEQ ID NO: 126463 - protein, 27 aa, Artificial Sequence
  Cyclic GFR-binding peptide
VGRKPKVNSLQEVVKENEDYYLMTLPE

SEQ ID NO: 126464 - protein, 27 aa, Artificial Sequence
  Cyclic GFR-binding peptide
VGRKPKVNSLQEVVNNASDYYLITLPE

SEQ ID NO: 126465 - protein, 27 aa, Artificial Sequence
  Cyclic GFR-binding peptide
VGRKPKVNSLQEVKPKRGVYYVIPLPE

SEQ ID NO: 126466 - protein, 27 aa, Artificial Sequence
  Cyclic GFR-binding peptide
VGRKPKVEYQKYIVNSSDDIYLVSIPS

SEQ ID NO: 126467 - protein, 27 aa, Artificial Sequence
  Cyclic GFR-binding peptide
VGRKPKVNSLQEVVKENEDYYVMPLPE

SEQ ID NO: 126468 - protein, 27 aa, Artificial Sequence
  Cyclic GFR-binding peptide
VGRKPKVEYQKYVVKDYEDIFLMSIPS

SEQ ID NO: 126469 - protein, 27 aa, Artificial Sequence
  Cyclic GFR-binding peptide
VGRKPKVNSLQEVVNNASDYYVIPLPE

SEQ ID NO: 126470 - protein, 27 aa, Artificial Sequence
  Cyclic GFR-binding peptide
VGRKPKVEYQKYVVNNASDIYLISIPS

SEQ ID NO: 126471 - protein, 27 aa, Artificial Sequence
  Cyclic GFR-binding peptide
VGRKPKVNSLQEVKPTRGVYYLITLPE

SEQ ID NO: 126472 - protein, 27 aa, Artificial Sequence
  Cyclic GFR-binding peptide
VGRKPKVEYQKYYTVVGKDIYLISIPS

SEQ ID NO: 126473 - protein, 27 aa, Artificial Sequence
  Cyclic GFR-binding peptide
VGRKPKVEYQKYIIQQKDNIYLMSIPS

SEQ ID NO: 126474 - protein, 27 aa, Artificial Sequence
  Cyclic GFR-binding peptide
VGRKPKVEYQKYTPVGMDDIYLVSIPS

SEQ ID NO: 126475 - protein, 27 aa, Artificial Sequence
  Cyclic GFR-binding peptide
VGRKPKVEYQKYIKPTKGIIFLISIPS

SEQ ID NO: 126476 - protein, 27 aa, Artificial Sequence
  Cyclic GFR-binding peptide
VGRKPKVEYQKYIVNNSSDIYLVSIPS

SEQ ID NO: 126477 - protein, 27 aa, Artificial Sequence
  Cyclic GFR-binding peptide
VGRKPKVNSLQEIKPTKGIYYLITLPE

SEQ ID NO: 126478 - protein, 27 aa, Artificial Sequence
  Cyclic GFR-binding peptide
VGRKPKVEYQKYVVNNASDIFLISIPS

SEQ ID NO: 126479 - protein, 27 aa, Artificial Sequence
  Cyclic GFR-binding peptide
VGRKPKVEYQKYVKPKRGVIFLISIPS

SEQ ID NO: 126480 - protein, 27 aa, Artificial Sequence
  Cyclic GFR-binding peptide
VGRKPKVNSLQEIVNSSDDYYVVPLPE

SEQ ID NO: 126481 - protein, 27 aa, Artificial Sequence
  Cyclic GFR-binding peptide
VGRKPKVNSLQEVVKDYEDYYVMPLPE

SEQ ID NO: 126482 - protein, 27 aa, Artificial Sequence
  Cyclic GFR-binding peptide
VGRKPKVEYQKYLLVRGNDIYLMSIPS

SEQ ID NO: 126483 - protein, 27 aa, Artificial Sequence
  Cyclic GFR-binding peptide
VGRKPKVNSLQEIVNSSDDYYLVTLPE

SEQ ID NO: 126484 - protein, 27 aa, Artificial Sequence
  Cyclic GFR-binding peptide
SPISMLYIDENEKVVYKQYEVGRKPKV

SEQ ID NO: 126485 - protein, 27 aa, Artificial Sequence
  Cyclic GFR-binding peptide
EPLTMLYYDEYDKVVEQLSNVGRKPKV

SEQ ID NO: 126486 - protein, 27 aa, Artificial Sequence
  Cyclic GFR-binding peptide
SPISMLFIDENEKVVYKQYEVGRKPKV

SEQ ID NO: 126487 - protein, 27 aa, Artificial Sequence
  Cyclic GFR-binding peptide
EPLPIVYYIGKTPKIEQLSNVGRKPKV

SEQ ID NO: 126488 - protein, 27 aa, Artificial Sequence
  Cyclic GFR-binding peptide
EPLTILYYVGRKPKVEQLSNVGRKPKV

SEQ ID NO: 126489 - protein, 27 aa, Artificial Sequence
  Cyclic GFR-binding peptide
SPISILYIDAANNVVYKQYEVGRKPKV

SEQ ID NO: 126490 - protein, 27 aa, Artificial Sequence
  Cyclic GFR-binding peptide
EPLPIVYYVGRTPKVEQLSNVGRKPKV

SEQ ID NO: 126491 - protein, 27 aa, Artificial Sequence
  Cyclic GFR-binding peptide
SPISVLFIDDSSNVIYKQYEVGRKPKV

SEQ ID NO: 126492 - protein, 27 aa, Artificial Sequence
  Cyclic GFR-binding peptide
SPISILFIVGRTPKVYKQYEVGRKPKV

SEQ ID NO: 126493 - protein, 27 aa, Artificial Sequence
  Cyclic GFR-binding peptide
SPISMLYIDEYDKVVYKQYEVGRKPKV

SEQ ID NO: 126494 - protein, 27 aa, Artificial Sequence
  Cyclic GFR-binding peptide
EPLTMLYYDENEKVVEQLSNVGRKPKV

SEQ ID NO: 126495 - protein, 27 aa, Artificial Sequence
  Cyclic GFR-binding peptide
EPLTILYYDSANNVVEQLSNVGRKPKV

SEQ ID NO: 126496 - protein, 27 aa, Artificial Sequence
  Cyclic GFR-binding peptide
EPLPIVYYVGRKPKVEQLSNVGRKPKV

SEQ ID NO: 126497 - protein, 27 aa, Artificial Sequence
  Cyclic GFR-binding peptide
SPISVLYIDDSSNVIYKQYEVGRKPKV

SEQ ID NO: 126498 - protein, 27 aa, Artificial Sequence
  Cyclic GFR-binding peptide
EPLPMVYYDENEKVVEQLSNVGRKPKV

SEQ ID NO: 126499 - protein, 27 aa, Artificial Sequence
  Cyclic GFR-binding peptide
SPISMLFIDEYDKVVYKQYEVGRKPKV

SEQ ID NO: 126500 - protein, 27 aa, Artificial Sequence
  Cyclic GFR-binding peptide
EPLPIVYYDSANNVVEQLSNVGRKPKV

SEQ ID NO: 126501 - protein, 27 aa, Artificial Sequence
  Cyclic GFR-binding peptide
SPISILYIDSANNVVYKQYEVGRKPKV

SEQ ID NO: 126502 - protein, 27 aa, Artificial Sequence
  Cyclic GFR-binding peptide
EPLTILYYVGRTPKVEQLSNVGRKPKV

SEQ ID NO: 126503 - protein, 27 aa, Artificial Sequence
  Cyclic GFR-binding peptide
SPISILYIDKGVVTYYKQYEVGRKPKV

SEQ ID NO: 126504 - protein, 27 aa, Artificial Sequence
  Cyclic GFR-binding peptide
SPISMLYINDKQQIIYKQYEVGRKPKV

SEQ ID NO: 126505 - protein, 27 aa, Artificial Sequence
  Cyclic GFR-binding peptide
SPISVLYIDDMGVPTYKQYEVGRKPKV

SEQ ID NO: 126506 - protein, 27 aa, Artificial Sequence
  Cyclic GFR-binding peptide
SPISILFIIGKTPKIYKQYEVGRKPKV

SEQ ID NO: 126507 - protein, 27 aa, Artificial Sequence
  Cyclic GFR-binding peptide
SPISVLYIDSSNNVIYKQYEVGRKPKV

SEQ ID NO: 126508 - protein, 27 aa, Artificial Sequence
  Cyclic GFR-binding peptide
EPLTILYYIGKTPKIEQLSNVGRKPKV

SEQ ID NO: 126509 - protein, 27 aa, Artificial Sequence
  Cyclic GFR-binding peptide
SPISILFIDSANNVVYKQYEVGRKPKV

SEQ ID NO: 126510 - protein, 27 aa, Artificial Sequence
  Cyclic GFR-binding peptide
SPISILFIVGRKPKVYKQYEVGRKPKV

SEQ ID NO: 126511 - protein, 27 aa, Artificial Sequence
  Cyclic GFR-binding peptide
EPLPVVYYDDSSNVIEQLSNVGRKPKV

SEQ ID NO: 126512 - protein, 27 aa, Artificial Sequence
  Cyclic GFR-binding peptide
EPLPMVYYDEYDKVVEQLSNVGRKPKV

SEQ ID NO: 126513 - protein, 27 aa, Artificial Sequence
  Cyclic GFR-binding peptide
SPISMLYIDNGRVLLYKQYEVGRKPKV

SEQ ID NO: 126514 - protein, 27 aa, Artificial Sequence
  Cyclic GFR-binding peptide
EPLTVLYYDDSSNVIEQLSNVGRKPKV

SEQ ID NO: 126515 - protein, 27 aa, Artificial Sequence
  Cyclic GFR-binding peptide
VGRKPKVPYVKLVVKENEDFFLMSLSS

SEQ ID NO: 126516 - protein, 29 aa, Artificial Sequence
  Cyclic GFR-binding peptide
VGRKPKVPYVKLHQGQHPKIRFFLMSLSS

SEQ ID NO: 126517 - protein, 27 aa, Artificial Sequence
  Cyclic GFR-binding peptide
VGRKPKVPYVKLVVNKNEDFFLISLSS

SEQ ID NO: 126518 - protein, 27 aa, Artificial Sequence
  Cyclic GFR-binding peptide
VGRKPKVPYVKLVKPKRGVLFFISLSS

SEQ ID NO: 126519 - protein, 27 aa, Artificial Sequence
  Cyclic GFR-binding peptide
VGRKPKVPYVKLVVNNAADFFLISLSS

SEQ ID NO: 126520 - protein, 27 aa, Artificial Sequence
  Cyclic GFR-binding peptide
VGRKPKVPYVKLIVNNSSDFFLVSLSS

SEQ ID NO: 126521 - protein, 27 aa, Artificial Sequence
  Cyclic GFR-binding peptide
VGRKPKVPYVKLIIQQKDNFFLMSLSS

SEQ ID NO: 126522 - protein, 27 aa, Artificial Sequence
  Cyclic GFR-binding peptide
VGRKPKVPYVKLLLVRGNDFFLMSLSS

SEQ ID NO: 126523 - protein, 27 aa, Artificial Sequence
  Cyclic GFR-binding peptide
VGRKPKVPYVKLVKPTRGVLFFISLSS

SEQ ID NO: 126524 - protein, 27 aa, Artificial Sequence
  Cyclic GFR-binding peptide
VGRKPKVPYVKLVVNNASDFFLISLSS

SEQ ID NO: 126525 - protein, 27 aa, Artificial Sequence
  Cyclic GFR-binding peptide
VGRKPKVPYVKLIKPTKGILFFISLSS

SEQ ID NO: 126526 - protein, 27 aa, Artificial Sequence
  Cyclic GFR-binding peptide
VGRKPKVPYVKLTPVGMDDFFLVSLSS

SEQ ID NO: 126527 - protein, 27 aa, Artificial Sequence
  Cyclic GFR-binding peptide
VGRKPKVPYVKLYTVVGKDFFLISLSS

SEQ ID NO: 126528 - protein, 27 aa, Artificial Sequence
  Cyclic GFR-binding peptide
VGRKPKVPYVKLVVKDYEDFFLMSLSS

SEQ ID NO: 126529 - protein, 27 aa, Artificial Sequence
  Cyclic GFR-binding peptide
VGRKPKVPYVKLIVNSSDDFFLVSLSS

SEQ ID NO: 126530 - protein, 29 aa, Artificial Sequence
  Cyclic GFR-binding peptide
VGRKPKVPYVKLLKPKKRVYEFFLVSLSS

SEQ ID NO: 126531 - protein, 27 aa, Artificial Sequence
  Cyclic GFR-binding peptide
SSLSMLFFDENEKVVLKVYPVGRKPKV

SEQ ID NO: 126532 - protein, 29 aa, Artificial Sequence
  Cyclic GFR-binding peptide
SSLSMLFFRIKPHQGQHLKVYPVGRKPKV

SEQ ID NO: 126533 - protein, 27 aa, Artificial Sequence
  Cyclic GFR-binding peptide
SSLSILFFDENKNVVLKVYPVGRKPKV

SEQ ID NO: 126534 - protein, 27 aa, Artificial Sequence
  Cyclic GFR-binding peptide
SSLSILFFVGRKPKVLKVYPVGRKPKV

SEQ ID NO: 126535 - protein, 27 aa, Artificial Sequence
  Cyclic GFR-binding peptide
SSLSILFFDAANNVVLKVYPVGRKPKV

SEQ ID NO: 126536 - protein, 27 aa, Artificial Sequence
  Cyclic GFR-binding peptide
SSLSVLFFDSSNNVILKVYPVGRKPKV

SEQ ID NO: 126537 - protein, 27 aa, Artificial Sequence
  Cyclic GFR-binding peptide
SSLSMLFFNDKQQIILKVYPVGRKPKV

SEQ ID NO: 126538 - protein, 27 aa, Artificial Sequence
  Cyclic GFR-binding peptide
SSLSMLFFDNGRVLLLKVYPVGRKPKV

SEQ ID NO: 126539 - protein, 27 aa, Artificial Sequence
  Cyclic GFR-binding peptide
SSLSILFFVGRTPKVLKVYPVGRKPKV

SEQ ID NO: 126540 - protein, 27 aa, Artificial Sequence
  Cyclic GFR-binding peptide
SSLSILFFDSANNVVLKVYPVGRKPKV

SEQ ID NO: 126541 - protein, 27 aa, Artificial Sequence
  Cyclic GFR-binding peptide
SSLSILFFIGKTPKILKVYPVGRKPKV

SEQ ID NO: 126542 - protein, 27 aa, Artificial Sequence
  Cyclic GFR-binding peptide
SSLSVLFFDDMGVPTLKVYPVGRKPKV

SEQ ID NO: 126543 - protein, 27 aa, Artificial Sequence
  Cyclic GFR-binding peptide
SSLSILFFDKGVVTYLKVYPVGRKPKV

SEQ ID NO: 126544 - protein, 27 aa, Artificial Sequence
  Cyclic GFR-binding peptide
SSLSMLFFDEYDKVVLKVYPVGRKPKV

SEQ ID NO: 126545 - protein, 27 aa, Artificial Sequence
  Cyclic GFR-binding peptide
SSLSVLFFDDSSNVILKVYPVGRKPKV

SEQ ID NO: 126546 - protein, 29 aa, Artificial Sequence
  Cyclic GFR-binding peptide
SSLSVLFFEYVRKKPKLLKVYPVGRKPKV

SEQ ID NO: 126547 - protein, 27 aa, Artificial Sequence
  Cyclic GFR-binding peptide
VGRKPKVNSLQEVVKDYEDYYLMTLPE

SEQ ID NO: 126548 - protein, 27 aa, Artificial Sequence
  Cyclic GFR-binding peptide
VGRKPKVNSLQEIKPTKGIYYVIPLPE

SEQ ID NO: 126549 - protein, 27 aa, Artificial Sequence
  Cyclic GFR-binding peptide
VGRKPKVSMEGIIVNSSDDMIQVTINS

SEQ ID NO: 126550 - protein, 27 aa, Artificial Sequence
  Cyclic GFR-binding peptide
VGRKPKVNSLQEVKPKRGVYYLITLPE

SEQ ID NO: 126551 - protein, 27 aa, Artificial Sequence
  Cyclic GFR-binding peptide
VGRKPKVNSLQEVKPTRGVYYVIPLPE

SEQ ID NO: 126552 - protein, 27 aa, Artificial Sequence
  Cyclic GFR-binding peptide
VGRKPKVVTAKKVVKENEDIKRMQVPR

SEQ ID NO: 126553 - protein, 27 aa, Artificial Sequence
  Cyclic GFR-binding peptide
VGRKPKVNSLQEIVNSSDDYYVVPLPE

SEQ ID NO: 126554 - protein, 29 aa, Artificial Sequence
  Cyclic GFR-binding peptide
VGRKPKVSMEGIHQGQHPKIRMIQMTINS

SEQ ID NO: 126555 - protein, 29 aa, Artificial Sequence
  Cyclic GFR-binding peptide
VGRKPKVVTAKKLKPKKRVYEIKRVQVPR

SEQ ID NO: 126556 - protein, 27 aa, Artificial Sequence
  Cyclic GFR-binding peptide
VGRKPKVSMEGIVVKDYEDMIQMTINS

SEQ ID NO: 126557 - protein, 29 aa, Artificial Sequence
  Cyclic GFR-binding peptide
VGRKPKVVQVEKHQGQHPKIRVKAMKVSR

SEQ ID NO: 126558 - protein, 27 aa, Artificial Sequence
  Cyclic GFR-binding peptide
VGRKPKVVTAKKIKPTKGIIKRIQVPR

SEQ ID NO: 126559 - protein, 27 aa, Artificial Sequence
  Cyclic GFR-binding peptide
VGRKPKVSMEGIVKPTRGVMIQITINS

SEQ ID NO: 126560 - protein, 29 aa, Artificial Sequence
  Cyclic GFR-binding peptide
VGRKPKVNSLQEFIPKKRVIEYYVVPLPE

SEQ ID NO: 126561 - protein, 27 aa, Artificial Sequence
  Cyclic GFR-binding peptide
VGRKPKVVQVEKVKPKRGVVKAIKVSR

SEQ ID NO: 126562 - protein, 27 aa, Artificial Sequence
  Cyclic GFR-binding peptide
VGRKPKVVQVEKVVKENEDVKAMKVSR

SEQ ID NO: 126563 - protein, 27 aa, Artificial Sequence
  Cyclic GFR-binding peptide
VGRKPKVNSLQEVVKENEDYYVMPLPE

SEQ ID NO: 126564 - protein, 27 aa, Artificial Sequence
  Cyclic GFR-binding peptide
VGRKPKVVTAKKIVNSSDDIKRVQVPR

SEQ ID NO: 126565 - protein, 27 aa, Artificial Sequence
  Cyclic GFR-binding peptide
VGRKPKVVQVEKIKPTKGIVKAIKVSR

SEQ ID NO: 126566 - protein, 27 aa, Artificial Sequence
  Cyclic GFR-binding peptide
VGRKPKVNSLQEIKPTKGIYYLITLPE

SEQ ID NO: 126567 - protein, 29 aa, Artificial Sequence
  Cyclic GFR-binding peptide
VGRKPKVNSLQEFIPKKRVIEYYLVTLPE

SEQ ID NO: 126568 - protein, 27 aa, Artificial Sequence
  Cyclic GFR-binding peptide
VGRKPKVVQVEKIVNSSDDVKAVKVSR

SEQ ID NO: 126569 - protein, 27 aa, Artificial Sequence
  Cyclic GFR-binding peptide
VGRKPKVNSLQEIVNSSDDYYLVTLPE

SEQ ID NO: 126570 - protein, 29 aa, Artificial Sequence
  Cyclic GFR-binding peptide
VGRKPKVVQVEKLKPKKRVYEVKAVKVSR

SEQ ID NO: 126571 - protein, 29 aa, Artificial Sequence
  Cyclic GFR-binding peptide
VGRKPKVVQVEKFIPKKRVIEVKAVKVSR

SEQ ID NO: 126572 - protein, 29 aa, Artificial Sequence
  Cyclic GFR-binding peptide
VGRKPKVVTAKKHQGQHPKIRIKRMQVPR

SEQ ID NO: 126573 - protein, 27 aa, Artificial Sequence
  Cyclic GFR-binding peptide
VGRKPKVNSLQEVVKENEDYYLMTLPE

SEQ ID NO: 126574 - protein, 29 aa, Artificial Sequence
  Cyclic GFR-binding peptide
VGRKPKVSMEGIFIPKKRVIEMIQVTINS

SEQ ID NO: 126575 - protein, 27 aa, Artificial Sequence
  Cyclic GFR-binding peptide
VGRKPKVNSLQEVKPKRGVYYVIPLPE

SEQ ID NO: 126576 - protein, 27 aa, Artificial Sequence
  Cyclic GFR-binding peptide
VGRKPKVVTAKKVKPKRGVIKRIQVPR

SEQ ID NO: 126577 - protein, 27 aa, Artificial Sequence
  Cyclic GFR-binding peptide
VGRKPKVNSLQEVKPTRGVYYLITLPE

SEQ ID NO: 126578 - protein, 27 aa, Artificial Sequence
  Cyclic GFR-binding peptide
VGRKPKVVQVEKVKPTRGVVKAIKVSR

SEQ ID NO: 126579 - protein, 29 aa, Artificial Sequence
  Cyclic GFR-binding peptide
VGRKPKVSMEGILKPKKRVYEMIQVTINS

SEQ ID NO: 126580 - protein, 27 aa, Artificial Sequence
  Cyclic GFR-binding peptide
VGRKPKVNSLQEVVKDYEDYYVMPLPE

SEQ ID NO: 126581 - protein, 27 aa, Artificial Sequence
  Cyclic GFR-binding peptide
VGRKPKVVTAKKVKPTRGVIKRIQVPR

SEQ ID NO: 126582 - protein, 29 aa, Artificial Sequence
  Cyclic GFR-binding peptide
VGRKPKVNSLQELKPKKRVYEYYLVTLPE

SEQ ID NO: 126583 - protein, 27 aa, Artificial Sequence
  Cyclic GFR-binding peptide
VGRKPKVSMEGIVKPKRGVMIQITINS

SEQ ID NO: 126584 - protein, 27 aa, Artificial Sequence
  Cyclic GFR-binding peptide
VGRKPKVSMEGIVVKENEDMIQMTINS

SEQ ID NO: 126585 - protein, 27 aa, Artificial Sequence
  Cyclic GFR-binding peptide
VGRKPKVSMEGIIKPTKGIMIQITINS

SEQ ID NO: 126586 - protein, 29 aa, Artificial Sequence
  Cyclic GFR-binding peptide
VGRKPKVNSLQEHQGQHPKIRYYLMTLPE

SEQ ID NO: 126587 - protein, 27 aa, Artificial Sequence
  Cyclic GFR-binding peptide
VGRKPKVVTAKKVVKDYEDIKRMQVPR

SEQ ID NO: 126588 - protein, 29 aa, Artificial Sequence
  Cyclic GFR-binding peptide
VGRKPKVNSLQEHQGQHPKIRYYVMPLPE

SEQ ID NO: 126589 - protein, 29 aa, Artificial Sequence
  Cyclic GFR-binding peptide
VGRKPKVNSLQELKPKKRVYEYYVVPLPE

SEQ ID NO: 126590 - protein, 29 aa, Artificial Sequence
  Cyclic GFR-binding peptide
VGRKPKVVTAKKFIPKKRVIEIKRVQVPR

SEQ ID NO: 126591 - protein, 27 aa, Artificial Sequence
  Cyclic GFR-binding peptide
VGRKPKVVQVEKVVKDYEDVKAMKVSR

SEQ ID NO: 126592 - protein, 27 aa, Artificial Sequence
  Cyclic GFR-binding peptide
EPLTMLYYDEYDKVVEQLSNVGRKPKV

SEQ ID NO: 126593 - protein, 27 aa, Artificial Sequence
  Cyclic GFR-binding peptide
EPLPIVYYIGKTPKIEQLSNVGRKPKV

SEQ ID NO: 126594 - protein, 27 aa, Artificial Sequence
  Cyclic GFR-binding peptide
SNITVQIMDDSSNVIIGEMSVGRKPKV

SEQ ID NO: 126595 - protein, 27 aa, Artificial Sequence
  Cyclic GFR-binding peptide
EPLTILYYVGRKPKVEQLSNVGRKPKV

SEQ ID NO: 126596 - protein, 27 aa, Artificial Sequence
  Cyclic GFR-binding peptide
EPLPIVYYVGRTPKVEQLSNVGRKPKV

SEQ ID NO: 126597 - protein, 27 aa, Artificial Sequence
  Cyclic GFR-binding peptide
RPVQMRKIDENEKVVKKATVVGRKPKV

SEQ ID NO: 126598 - protein, 27 aa, Artificial Sequence
  Cyclic GFR-binding peptide
EPLPVVYYDDSSNVIEQLSNVGRKPKV

SEQ ID NO: 126599 - protein, 29 aa, Artificial Sequence
  Cyclic GFR-binding peptide
SNITMQIMRIKPHQGQHIGEMSVGRKPKV

SEQ ID NO: 126600 - protein, 29 aa, Artificial Sequence
  Cyclic GFR-binding peptide
RPVQVRKIEYVRKKPKLKKATVVGRKPKV

SEQ ID NO: 126601 - protein, 27 aa, Artificial Sequence
  Cyclic GFR-binding peptide
SNITMQIMDEYDKVVIGEMSVGRKPKV

SEQ ID NO: 126602 - protein, 29 aa, Artificial Sequence
  Cyclic GFR-binding peptide
RSVKMAKVRIKPHQGQHKEVQVVGRKPKV

SEQ ID NO: 126603 - protein, 27 aa, Artificial Sequence
  Cyclic GFR-binding peptide
RPVQIRKIIGKTPKIKKATVVGRKPKV

SEQ ID NO: 126604 - protein, 27 aa, Artificial Sequence
  Cyclic GFR-binding peptide
SNITIQIMVGRTPKVIGEMSVGRKPKV

SEQ ID NO: 126605 - protein, 29 aa, Artificial Sequence
  Cyclic GFR-binding peptide
EPLPVVYYEIVRKKPIFEQLSNVGRKPKV

SEQ ID NO: 126606 - protein, 27 aa, Artificial Sequence
  Cyclic GFR-binding peptide
RSVKIAKVVGRKPKVKEVQVVGRKPKV

SEQ ID NO: 126607 - protein, 27 aa, Artificial Sequence
  Cyclic GFR-binding peptide
RSVKMAKVDENEKVVKEVQVVGRKPKV

SEQ ID NO: 126608 - protein, 27 aa, Artificial Sequence
  Cyclic GFR-binding peptide
EPLPMVYYDENEKVVEQLSNVGRKPKV

SEQ ID NO: 126609 - protein, 27 aa, Artificial Sequence
  Cyclic GFR-binding peptide
RPVQVRKIDDSSNVIKKATVVGRKPKV

SEQ ID NO: 126610 - protein, 27 aa, Artificial Sequence
  Cyclic GFR-binding peptide
RSVKIAKVIGKTPKIKEVQVVGRKPKV

SEQ ID NO: 126611 - protein, 27 aa, Artificial Sequence
  Cyclic GFR-binding peptide
EPLTILYYIGKTPKIEQLSNVGRKPKV

SEQ ID NO: 126612 - protein, 29 aa, Artificial Sequence
  Cyclic GFR-binding peptide
EPLTVLYYEIVRKKPIFEQLSNVGRKPKV

SEQ ID NO: 126613 - protein, 27 aa, Artificial Sequence
  Cyclic GFR-binding peptide
RSVKVAKVDDSSNVIKEVQVVGRKPKV

SEQ ID NO: 126614 - protein, 27 aa, Artificial Sequence
  Cyclic GFR-binding peptide
EPLTVLYYDDSSNVIEQLSNVGRKPKV

SEQ ID NO: 126615 - protein, 29 aa, Artificial Sequence
  Cyclic GFR-binding peptide
RSVKVAKVEYVRKKPKLKEVQVVGRKPKV

SEQ ID NO: 126616 - protein, 29 aa, Artificial Sequence
  Cyclic GFR-binding peptide
RSVKVAKVEIVRKKPIFKEVQVVGRKPKV

SEQ ID NO: 126617 - protein, 29 aa, Artificial Sequence
  Cyclic GFR-binding peptide
RPVQMRKIRIKPHQGQHKKATVVGRKPKV

SEQ ID NO: 126618 - protein, 27 aa, Artificial Sequence
  Cyclic GFR-binding peptide
EPLTMLYYDENEKVVEQLSNVGRKPKV

SEQ ID NO: 126619 - protein, 29 aa, Artificial Sequence
  Cyclic GFR-binding peptide
SNITVQIMEIVRKKPIFIGEMSVGRKPKV

SEQ ID NO: 126620 - protein, 27 aa, Artificial Sequence
  Cyclic GFR-binding peptide
EPLPIVYYVGRKPKVEQLSNVGRKPKV

SEQ ID NO: 126621 - protein, 27 aa, Artificial Sequence
  Cyclic GFR-binding peptide
RPVQIRKIVGRKPKVKKATVVGRKPKV

SEQ ID NO: 126622 - protein, 27 aa, Artificial Sequence
  Cyclic GFR-binding peptide
EPLTILYYVGRTPKVEQLSNVGRKPKV

SEQ ID NO: 126623 - protein, 27 aa, Artificial Sequence
  Cyclic GFR-binding peptide
RSVKIAKVVGRTPKVKEVQVVGRKPKV

SEQ ID NO: 126624 - protein, 29 aa, Artificial Sequence
  Cyclic GFR-binding peptide
SNITVQIMEYVRKKPKLIGEMSVGRKPKV

SEQ ID NO: 126625 - protein, 27 aa, Artificial Sequence
  Cyclic GFR-binding peptide
EPLPMVYYDEYDKVVEQLSNVGRKPKV

SEQ ID NO: 126626 - protein, 27 aa, Artificial Sequence
  Cyclic GFR-binding peptide
RPVQIRKIVGRTPKVKKATVVGRKPKV

SEQ ID NO: 126627 - protein, 29 aa, Artificial Sequence
  Cyclic GFR-binding peptide
EPLTVLYYEYVRKKPKLEQLSNVGRKPKV

SEQ ID NO: 126628 - protein, 27 aa, Artificial Sequence
  Cyclic GFR-binding peptide
SNITIQIMVGRKPKVIGEMSVGRKPKV

SEQ ID NO: 126629 - protein, 27 aa, Artificial Sequence
  Cyclic GFR-binding peptide
SNITMQIMDENEKVVIGEMSVGRKPKV

SEQ ID NO: 126630 - protein, 27 aa, Artificial Sequence
  Cyclic GFR-binding peptide
SNITIQIMIGKTPKIIGEMSVGRKPKV

SEQ ID NO: 126631 - protein, 29 aa, Artificial Sequence
  Cyclic GFR-binding peptide
EPLTMLYYRIKPHQGQHEQLSNVGRKPKV

SEQ ID NO: 126632 - protein, 27 aa, Artificial Sequence
  Cyclic GFR-binding peptide
RPVQMRKIDEYDKVVKKATVVGRKPKV

SEQ ID NO: 126633 - protein, 29 aa, Artificial Sequence
  Cyclic GFR-binding peptide
EPLPMVYYRIKPHQGQHEQLSNVGRKPKV

SEQ ID NO: 126634 - protein, 29 aa, Artificial Sequence
  Cyclic GFR-binding peptide
EPLPVVYYEYVRKKPKLEQLSNVGRKPKV

SEQ ID NO: 126635 - protein, 29 aa, Artificial Sequence
  Cyclic GFR-binding peptide
RPVQVRKIEIVRKKPIFKKATVVGRKPKV

SEQ ID NO: 126636 - protein, 27 aa, Artificial Sequence
  Cyclic GFR-binding peptide
RSVKMAKVDEYDKVVKEVQVVGRKPKV

SEQ ID NO: 126637 - protein, 27 aa, Artificial Sequence
  Cyclic GFR-binding peptide
VGRKPKVRYKKLIIQQKDNFYLMSIAN

SEQ ID NO: 126638 - protein, 27 aa, Artificial Sequence
  Cyclic GFR-binding peptide
VGRKPKVRYKKLIVNNSSDFYLVSIAN

SEQ ID NO: 126639 - protein, 27 aa, Artificial Sequence
  Cyclic GFR-binding peptide
VGRKPKVRYKKLYTVVGKDFYLISIAN

SEQ ID NO: 126640 - protein, 27 aa, Artificial Sequence
  Cyclic GFR-binding peptide
VGRKPKVRYKKLIVNSSDDFYLVSIAN

SEQ ID NO: 126641 - protein, 27 aa, Artificial Sequence
  Cyclic GFR-binding peptide
VGRKPKVRYKKLVVKDYEDFYLMSIAN

SEQ ID NO: 126642 - protein, 27 aa, Artificial Sequence
  Cyclic GFR-binding peptide
VGRKPKVRYKKLLLVRGNDFYLMSIAN

SEQ ID NO: 126643 - protein, 27 aa, Artificial Sequence
  Cyclic GFR-binding peptide
VGRKPKVRYKKLVVKENEDFYLMSIAN

SEQ ID NO: 126644 - protein, 27 aa, Artificial Sequence
  Cyclic GFR-binding peptide
VGRKPKVRYKKLVVNNAADFYLISIAN

SEQ ID NO: 126645 - protein, 27 aa, Artificial Sequence
  Cyclic GFR-binding peptide
VGRKPKVRYKKLTPVGMDDFYLVSIAN

SEQ ID NO: 126646 - protein, 27 aa, Artificial Sequence
  Cyclic GFR-binding peptide
VGRKPKVRYKKLVVNNASDFYLISIAN

SEQ ID NO: 126647 - protein, 27 aa, Artificial Sequence
  Cyclic GFR-binding peptide
NAISMLYFNDKQQIILKKYRVGRKPKV

SEQ ID NO: 126648 - protein, 27 aa, Artificial Sequence
  Cyclic GFR-binding peptide
NAISVLYFDSSNNVILKKYRVGRKPKV

SEQ ID NO: 126649 - protein, 27 aa, Artificial Sequence
  Cyclic GFR-binding peptide
NAISILYFDKGVVTYLKKYRVGRKPKV

SEQ ID NO: 126650 - protein, 27 aa, Artificial Sequence
  Cyclic GFR-binding peptide
NAISVLYFDDSSNVILKKYRVGRKPKV

SEQ ID NO: 126651 - protein, 27 aa, Artificial Sequence
  Cyclic GFR-binding peptide
NAISMLYFDEYDKVVLKKYRVGRKPKV

SEQ ID NO: 126652 - protein, 27 aa, Artificial Sequence
  Cyclic GFR-binding peptide
NAISMLYFDNGRVLLLKKYRVGRKPKV

SEQ ID NO: 126653 - protein, 27 aa, Artificial Sequence
  Cyclic GFR-binding peptide
NAISMLYFDENEKVVLKKYRVGRKPKV

SEQ ID NO: 126654 - protein, 27 aa, Artificial Sequence
  Cyclic GFR-binding peptide
NAISILYFDAANNVVLKKYRVGRKPKV

SEQ ID NO: 126655 - protein, 27 aa, Artificial Sequence
  Cyclic GFR-binding peptide
NAISVLYFDDMGVPTLKKYRVGRKPKV

SEQ ID NO: 126656 - protein, 27 aa, Artificial Sequence
  Cyclic GFR-binding peptide
NAISILYFDSANNVVLKKYRVGRKPKV

SEQ ID NO: 126657 - protein, 27 aa, Artificial Sequence
  Cyclic GFR-binding peptide
VGRKPKVEYKFKVKPTRGVLYLISIPE

SEQ ID NO: 126658 - protein, 27 aa, Artificial Sequence
  Cyclic GFR-binding peptide
VGRKPKVYHYKLVVKDYEDKYLMSIPS

SEQ ID NO: 126659 - protein, 27 aa, Artificial Sequence
  Cyclic GFR-binding peptide
VGRKPKVEYKFKTPVGMDDLYLVSIPE

SEQ ID NO: 126660 - protein, 27 aa, Artificial Sequence
  Cyclic GFR-binding peptide
VGRKPKVRYKKLVVKDYEDFYLMSIAN

SEQ ID NO: 126661 - protein, 27 aa, Artificial Sequence
  Cyclic GFR-binding peptide
VGRKPKVRHKRLVKPKRGVYYLISTAS

SEQ ID NO: 126662 - protein, 27 aa, Artificial Sequence
  Cyclic GFR-binding peptide
VGRKPKVYHYKLVKPKRGVKYLISIPS

SEQ ID NO: 126663 - protein, 27 aa, Artificial Sequence
  Cyclic GFR-binding peptide
VGRKPKVEYKFKIKPTKGILYLISIPE

SEQ ID NO: 126664 - protein, 27 aa, Artificial Sequence
  Cyclic GFR-binding peptide
VGRKPKVEYKFKVVNKNEDLYLISIPE

SEQ ID NO: 126665 - protein, 27 aa, Artificial Sequence
  Cyclic GFR-binding peptide
VGRKPKVPIKGYVKPTRGVFYLINIPS

SEQ ID NO: 126666 - protein, 27 aa, Artificial Sequence
  Cyclic GFR-binding peptide
VGRKPKVPIKGYVVKENEDFYLMNIPS

SEQ ID NO: 126667 - protein, 27 aa, Artificial Sequence
  Cyclic GFR-binding peptide
VGRKPKVYHYKLYTVVGKDKYLISIPS

SEQ ID NO: 126668 - protein, 27 aa, Artificial Sequence
  Cyclic GFR-binding peptide
VGRKPKVEYKFKLLVRGNDLYLMSIPE

SEQ ID NO: 126669 - protein, 27 aa, Artificial Sequence
  Cyclic GFR-binding peptide
VGRKPKVRYKKLVKPKRGVFYLISIAN

SEQ ID NO: 126670 - protein, 27 aa, Artificial Sequence
  Cyclic GFR-binding peptide
VGRKPKVPIKGYTPVGMDDFYLVNIPS

SEQ ID NO: 126671 - protein, 27 aa, Artificial Sequence
  Cyclic GFR-binding peptide
VGRKPKVYHYKLVVNKNEDKYLISIPS

SEQ ID NO: 126672 - protein, 27 aa, Artificial Sequence
  Cyclic GFR-binding peptide
VGRKPKVYHYKLIVNSSDDKYLVSIPS

SEQ ID NO: 126673 - protein, 27 aa, Artificial Sequence
  Cyclic GFR-binding peptide
VGRKPKVPIKGYIVNSSDDFYLVNIPS

SEQ ID NO: 126674 - protein, 27 aa, Artificial Sequence
  Cyclic GFR-binding peptide
VGRKPKVRYKKLYTVVGKDFYLISIAN

SEQ ID NO: 126675 - protein, 27 aa, Artificial Sequence
  Cyclic GFR-binding peptide
VGRKPKVRHKRLLLVRGNDYYLMSTAS

SEQ ID NO: 126676 - protein, 27 aa, Artificial Sequence
  Cyclic GFR-binding peptide
VGRKPKVYHYKLLLVRGNDKYLMSIPS

SEQ ID NO: 126677 - protein, 27 aa, Artificial Sequence
  Cyclic GFR-binding peptide
VGRKPKVRYKKLIVNSSDDFYLVSIAN

SEQ ID NO: 126678 - protein, 27 aa, Artificial Sequence
  Cyclic GFR-binding peptide
VGRKPKVRHKRLVVNKNEDYYLISTAS

SEQ ID NO: 126679 - protein, 27 aa, Artificial Sequence
  Cyclic GFR-binding peptide
VGRKPKVRHKRLIKPTKGIYYLISTAS

SEQ ID NO: 126680 - protein, 27 aa, Artificial Sequence
  Cyclic GFR-binding peptide
VGRKPKVPIKGYYTVVGKDFYLINIPS

SEQ ID NO: 126681 - protein, 27 aa, Artificial Sequence
  Cyclic GFR-binding peptide
VGRKPKVYHYKLTPVGMDDKYLVSIPS

SEQ ID NO: 126682 - protein, 27 aa, Artificial Sequence
  Cyclic GFR-binding peptide
VGRKPKVRHKRLIVNNSSDYYLVSTAS

SEQ ID NO: 126683 - protein, 27 aa, Artificial Sequence
  Cyclic GFR-binding peptide
VGRKPKVRYKKLLLVRGNDFYLMSIAN

SEQ ID NO: 126684 - protein, 27 aa, Artificial Sequence
  Cyclic GFR-binding peptide
VGRKPKVYHYKLVKPTRGVKYLISIPS

SEQ ID NO: 126685 - protein, 27 aa, Artificial Sequence
  Cyclic GFR-binding peptide
VGRKPKVRHKRLIVNSSDDYYLVSTAS

SEQ ID NO: 126686 - protein, 27 aa, Artificial Sequence
  Cyclic GFR-binding peptide
VGRKPKVPIKGYLLVRGNDFYLMNIPS

SEQ ID NO: 126687 - protein, 27 aa, Artificial Sequence
  Cyclic GFR-binding peptide
VGRKPKVRYKKLVVNKNEDFYLISIAN

SEQ ID NO: 126688 - protein, 27 aa, Artificial Sequence
  Cyclic GFR-binding peptide
VGRKPKVEYKFKVVKDYEDLYLMSIPE

SEQ ID NO: 126689 - protein, 27 aa, Artificial Sequence
  Cyclic GFR-binding peptide
VGRKPKVPIKGYVVNKNEDFYLINIPS

SEQ ID NO: 126690 - protein, 27 aa, Artificial Sequence
  Cyclic GFR-binding peptide
VGRKPKVPIKGYIKPTKGIFYLINIPS

SEQ ID NO: 126691 - protein, 27 aa, Artificial Sequence
  Cyclic GFR-binding peptide
VGRKPKVEYKFKVVNNAADLYLISIPE

SEQ ID NO: 126692 - protein, 27 aa, Artificial Sequence
  Cyclic GFR-binding peptide
VGRKPKVRHKRLYTVVGKDYYLISTAS

SEQ ID NO: 126693 - protein, 27 aa, Artificial Sequence
  Cyclic GFR-binding peptide
VGRKPKVRYKKLIKPTKGIFYLISIAN

SEQ ID NO: 126694 - protein, 27 aa, Artificial Sequence
  Cyclic GFR-binding peptide
VGRKPKVPIKGYVVKDYEDFYLMNIPS

SEQ ID NO: 126695 - protein, 27 aa, Artificial Sequence
  Cyclic GFR-binding peptide
VGRKPKVEYKFKVVNNASDLYLISIPE

SEQ ID NO: 126696 - protein, 27 aa, Artificial Sequence
  Cyclic GFR-binding peptide
VGRKPKVRYKKLVKPTRGVFYLISIAN

SEQ ID NO: 126697 - protein, 27 aa, Artificial Sequence
  Cyclic GFR-binding peptide
VGRKPKVRHKRLVVKENEDYYLMSTAS

SEQ ID NO: 126698 - protein, 27 aa, Artificial Sequence
  Cyclic GFR-binding peptide
VGRKPKVYHYKLIKPTKGIKYLISIPS

SEQ ID NO: 126699 - protein, 27 aa, Artificial Sequence
  Cyclic GFR-binding peptide
VGRKPKVYHYKLVVKENEDKYLMSIPS

SEQ ID NO: 126700 - protein, 27 aa, Artificial Sequence
  Cyclic GFR-binding peptide
VGRKPKVRHKRLIIQQKDNYYLMSTAS

SEQ ID NO: 126701 - protein, 27 aa, Artificial Sequence
  Cyclic GFR-binding peptide
VGRKPKVRYKKLVVKENEDFYLMSIAN

SEQ ID NO: 126702 - protein, 27 aa, Artificial Sequence
  Cyclic GFR-binding peptide
VGRKPKVRYKKLVVNNAADFYLISIAN

SEQ ID NO: 126703 - protein, 27 aa, Artificial Sequence
  Cyclic GFR-binding peptide
VGRKPKVEYKFKIIQQKDNLYLMSIPE

SEQ ID NO: 126704 - protein, 27 aa, Artificial Sequence
  Cyclic GFR-binding peptide
VGRKPKVRYKKLTPVGMDDFYLVSIAN

SEQ ID NO: 126705 - protein, 27 aa, Artificial Sequence
  Cyclic GFR-binding peptide
VGRKPKVYHYKLVVNNAADKYLISIPS

SEQ ID NO: 126706 - protein, 27 aa, Artificial Sequence
  Cyclic GFR-binding peptide
VGRKPKVPIKGYIVNNSSDFYLVNIPS

SEQ ID NO: 126707 - protein, 27 aa, Artificial Sequence
  Cyclic GFR-binding peptide
VGRKPKVPIKGYVKPKRGVFYLINIPS

SEQ ID NO: 126708 - protein, 27 aa, Artificial Sequence
  Cyclic GFR-binding peptide
VGRKPKVRYKKLIIQQKDNFYLMSIAN

SEQ ID NO: 126709 - protein, 27 aa, Artificial Sequence
  Cyclic GFR-binding peptide
VGRKPKVPIKGYIIQQKDNFYLMNIPS

SEQ ID NO: 126710 - protein, 27 aa, Artificial Sequence
  Cyclic GFR-binding peptide
VGRKPKVRYKKLIVNNSSDFYLVSIAN

SEQ ID NO: 126711 - protein, 27 aa, Artificial Sequence
  Cyclic GFR-binding peptide
VGRKPKVPIKGYVVNNAADFYLINIPS

SEQ ID NO: 126712 - protein, 27 aa, Artificial Sequence
  Cyclic GFR-binding peptide
VGRKPKVRHKRLVKPTRGVYYLISTAS

SEQ ID NO: 126713 - protein, 27 aa, Artificial Sequence
  Cyclic GFR-binding peptide
VGRKPKVEYKFKIVNNSSDLYLVSIPE

SEQ ID NO: 126714 - protein, 27 aa, Artificial Sequence
  Cyclic GFR-binding peptide
VGRKPKVRHKRLVVNNASDYYLISTAS

SEQ ID NO: 126715 - protein, 27 aa, Artificial Sequence
  Cyclic GFR-binding peptide
VGRKPKVRHKRLTPVGMDDYYLVSTAS

SEQ ID NO: 126716 - protein, 27 aa, Artificial Sequence
  Cyclic GFR-binding peptide
VGRKPKVYHYKLIVNNSSDKYLVSIPS

SEQ ID NO: 126717 - protein, 27 aa, Artificial Sequence
  Cyclic GFR-binding peptide
VGRKPKVYHYKLVVNNASDKYLISIPS

SEQ ID NO: 126718 - protein, 27 aa, Artificial Sequence
  Cyclic GFR-binding peptide
VGRKPKVEYKFKIVNSSDDLYLVSIPE

SEQ ID NO: 126719 - protein, 27 aa, Artificial Sequence
  Cyclic GFR-binding peptide
VGRKPKVEYKFKVKPKRGVLYLISIPE

SEQ ID NO: 126720 - protein, 27 aa, Artificial Sequence
  Cyclic GFR-binding peptide
VGRKPKVRHKRLVVKDYEDYYLMSTAS

SEQ ID NO: 126721 - protein, 27 aa, Artificial Sequence
  Cyclic GFR-binding peptide
VGRKPKVEYKFKVVKENEDLYLMSIPE

SEQ ID NO: 126722 - protein, 27 aa, Artificial Sequence
  Cyclic GFR-binding peptide
VGRKPKVEYKFKYTVVGKDLYLISIPE

SEQ ID NO: 126723 - protein, 27 aa, Artificial Sequence
  Cyclic GFR-binding peptide
VGRKPKVPIKGYVVNNASDFYLINIPS

SEQ ID NO: 126724 - protein, 27 aa, Artificial Sequence
  Cyclic GFR-binding peptide
VGRKPKVYHYKLIIQQKDNKYLMSIPS

SEQ ID NO: 126725 - protein, 27 aa, Artificial Sequence
  Cyclic GFR-binding peptide
VGRKPKVRYKKLVVNNASDFYLISIAN

SEQ ID NO: 126726 - protein, 27 aa, Artificial Sequence
  Cyclic GFR-binding peptide
VGRKPKVRHKRLVVNNAADYYLISTAS

SEQ ID NO: 126727 - protein, 27 aa, Artificial Sequence
  Cyclic GFR-binding peptide
EPISILYLVGRTPKVKFKYEVGRKPKV

SEQ ID NO: 126728 - protein, 27 aa, Artificial Sequence
  Cyclic GFR-binding peptide
SPISMLYKDEYDKVVLKYHYVGRKPKV

SEQ ID NO: 126729 - protein, 27 aa, Artificial Sequence
  Cyclic GFR-binding peptide
EPISVLYLDDMGVPTKFKYEVGRKPKV

SEQ ID NO: 126730 - protein, 27 aa, Artificial Sequence
  Cyclic GFR-binding peptide
NAISMLYFDEYDKVVLKKYRVGRKPKV

SEQ ID NO: 126731 - protein, 27 aa, Artificial Sequence
  Cyclic GFR-binding peptide
SATSILYYVGRKPKVLRKHRVGRKPKV

SEQ ID NO: 126732 - protein, 27 aa, Artificial Sequence
  Cyclic GFR-binding peptide
SPISILYKVGRKPKVLKYHYVGRKPKV

SEQ ID NO: 126733 - protein, 27 aa, Artificial Sequence
  Cyclic GFR-binding peptide
EPISILYLIGKTPKIKFKYEVGRKPKV

SEQ ID NO: 126734 - protein, 27 aa, Artificial Sequence
  Cyclic GFR-binding peptide
EPISILYLDENKNVVKFKYEVGRKPKV

SEQ ID NO: 126735 - protein, 27 aa, Artificial Sequence
  Cyclic GFR-binding peptide
SPINILYFVGRTPKVYGKIPVGRKPKV

SEQ ID NO: 126736 - protein, 27 aa, Artificial Sequence
  Cyclic GFR-binding peptide
SPINMLYFDENEKVVYGKIPVGRKPKV

SEQ ID NO: 126737 - protein, 27 aa, Artificial Sequence
  Cyclic GFR-binding peptide
SPISILYKDKGVVTYLKYHYVGRKPKV

SEQ ID NO: 126738 - protein, 27 aa, Artificial Sequence
  Cyclic GFR-binding peptide
EPISMLYLDNGRVLLKFKYEVGRKPKV

SEQ ID NO: 126739 - protein, 27 aa, Artificial Sequence
  Cyclic GFR-binding peptide
NAISILYFVGRKPKVLKKYRVGRKPKV

SEQ ID NO: 126740 - protein, 27 aa, Artificial Sequence
  Cyclic GFR-binding peptide
SPINVLYFDDMGVPTYGKIPVGRKPKV

SEQ ID NO: 126741 - protein, 27 aa, Artificial Sequence
  Cyclic GFR-binding peptide
SPISILYKDENKNVVLKYHYVGRKPKV

SEQ ID NO: 126742 - protein, 27 aa, Artificial Sequence
  Cyclic GFR-binding peptide
SPISVLYKDDSSNVILKYHYVGRKPKV

SEQ ID NO: 126743 - protein, 27 aa, Artificial Sequence
  Cyclic GFR-binding peptide
SPINVLYFDDSSNVIYGKIPVGRKPKV

SEQ ID NO: 126744 - protein, 27 aa, Artificial Sequence
  Cyclic GFR-binding peptide
NAISILYFDKGVVTYLKKYRVGRKPKV

SEQ ID NO: 126745 - protein, 27 aa, Artificial Sequence
  Cyclic GFR-binding peptide
SATSMLYYDNGRVLLLRKHRVGRKPKV

SEQ ID NO: 126746 - protein, 27 aa, Artificial Sequence
  Cyclic GFR-binding peptide
SPISMLYKDNGRVLLLKYHYVGRKPKV

SEQ ID NO: 126747 - protein, 27 aa, Artificial Sequence
  Cyclic GFR-binding peptide
NAISVLYFDDSSNVILKKYRVGRKPKV

SEQ ID NO: 126748 - protein, 27 aa, Artificial Sequence
  Cyclic GFR-binding peptide
SATSILYYDENKNVVLRKHRVGRKPKV

SEQ ID NO: 126749 - protein, 27 aa, Artificial Sequence
  Cyclic GFR-binding peptide
SATSILYYIGKTPKILRKHRVGRKPKV

SEQ ID NO: 126750 - protein, 27 aa, Artificial Sequence
  Cyclic GFR-binding peptide
SPINILYFDKGVVTYYGKIPVGRKPKV

SEQ ID NO: 126751 - protein, 27 aa, Artificial Sequence
  Cyclic GFR-binding peptide
SPISVLYKDDMGVPTLKYHYVGRKPKV

SEQ ID NO: 126752 - protein, 27 aa, Artificial Sequence
  Cyclic GFR-binding peptide
SATSVLYYDSSNNVILRKHRVGRKPKV

SEQ ID NO: 126753 - protein, 27 aa, Artificial Sequence
  Cyclic GFR-binding peptide
NAISMLYFDNGRVLLLKKYRVGRKPKV

SEQ ID NO: 126754 - protein, 27 aa, Artificial Sequence
  Cyclic GFR-binding peptide
SPISILYKVGRTPKVLKYHYVGRKPKV

SEQ ID NO: 126755 - protein, 27 aa, Artificial Sequence
  Cyclic GFR-binding peptide
SATSVLYYDDSSNVILRKHRVGRKPKV

SEQ ID NO: 126756 - protein, 27 aa, Artificial Sequence
  Cyclic GFR-binding peptide
SPINMLYFDNGRVLLYGKIPVGRKPKV

SEQ ID NO: 126757 - protein, 27 aa, Artificial Sequence
  Cyclic GFR-binding peptide
NAISILYFDENKNVVLKKYRVGRKPKV

SEQ ID NO: 126758 - protein, 27 aa, Artificial Sequence
  Cyclic GFR-binding peptide
EPISMLYLDEYDKVVKFKYEVGRKPKV

SEQ ID NO: 126759 - protein, 27 aa, Artificial Sequence
  Cyclic GFR-binding peptide
SPINILYFDENKNVVYGKIPVGRKPKV

SEQ ID NO: 126760 - protein, 27 aa, Artificial Sequence
  Cyclic GFR-binding peptide
SPINILYFIGKTPKIYGKIPVGRKPKV

SEQ ID NO: 126761 - protein, 27 aa, Artificial Sequence
  Cyclic GFR-binding peptide
EPISILYLDAANNVVKFKYEVGRKPKV

SEQ ID NO: 126762 - protein, 27 aa, Artificial Sequence
  Cyclic GFR-binding peptide
SATSILYYDKGVVTYLRKHRVGRKPKV

SEQ ID NO: 126763 - protein, 27 aa, Artificial Sequence
  Cyclic GFR-binding peptide
NAISILYFIGKTPKILKKYRVGRKPKV

SEQ ID NO: 126764 - protein, 27 aa, Artificial Sequence
  Cyclic GFR-binding peptide
SPINMLYFDEYDKVVYGKIPVGRKPKV

SEQ ID NO: 126765 - protein, 27 aa, Artificial Sequence
  Cyclic GFR-binding peptide
EPISILYLDSANNVVKFKYEVGRKPKV

SEQ ID NO: 126766 - protein, 27 aa, Artificial Sequence
  Cyclic GFR-binding peptide
NAISILYFVGRTPKVLKKYRVGRKPKV

SEQ ID NO: 126767 - protein, 27 aa, Artificial Sequence
  Cyclic GFR-binding peptide
SATSMLYYDENEKVVLRKHRVGRKPKV

SEQ ID NO: 126768 - protein, 27 aa, Artificial Sequence
  Cyclic GFR-binding peptide
SPISILYKIGKTPKILKYHYVGRKPKV

SEQ ID NO: 126769 - protein, 27 aa, Artificial Sequence
  Cyclic GFR-binding peptide
SPISMLYKDENEKVVLKYHYVGRKPKV

SEQ ID NO: 126770 - protein, 27 aa, Artificial Sequence
  Cyclic GFR-binding peptide
SATSMLYYNDKQQIILRKHRVGRKPKV

SEQ ID NO: 126771 - protein, 27 aa, Artificial Sequence
  Cyclic GFR-binding peptide
NAISMLYFDENEKVVLKKYRVGRKPKV

SEQ ID NO: 126772 - protein, 27 aa, Artificial Sequence
  Cyclic GFR-binding peptide
NAISILYFDAANNVVLKKYRVGRKPKV

SEQ ID NO: 126773 - protein, 27 aa, Artificial Sequence
  Cyclic GFR-binding peptide
EPISMLYLNDKQQIIKFKYEVGRKPKV

SEQ ID NO: 126774 - protein, 27 aa, Artificial Sequence
  Cyclic GFR-binding peptide
NAISVLYFDDMGVPTLKKYRVGRKPKV

SEQ ID NO: 126775 - protein, 27 aa, Artificial Sequence
  Cyclic GFR-binding peptide
SPISILYKDAANNVVLKYHYVGRKPKV

SEQ ID NO: 126776 - protein, 27 aa, Artificial Sequence
  Cyclic GFR-binding peptide
SPINVLYFDSSNNVIYGKIPVGRKPKV

SEQ ID NO: 126777 - protein, 27 aa, Artificial Sequence
  Cyclic GFR-binding peptide
SPINILYFVGRKPKVYGKIPVGRKPKV

SEQ ID NO: 126778 - protein, 27 aa, Artificial Sequence
  Cyclic GFR-binding peptide
NAISMLYFNDKQQIILKKYRVGRKPKV

SEQ ID NO: 126779 - protein, 27 aa, Artificial Sequence
  Cyclic GFR-binding peptide
SPINMLYFNDKQQIIYGKIPVGRKPKV

SEQ ID NO: 126780 - protein, 27 aa, Artificial Sequence
  Cyclic GFR-binding peptide
NAISVLYFDSSNNVILKKYRVGRKPKV

SEQ ID NO: 126781 - protein, 27 aa, Artificial Sequence
  Cyclic GFR-binding peptide
SPINILYFDAANNVVYGKIPVGRKPKV

SEQ ID NO: 126782 - protein, 27 aa, Artificial Sequence
  Cyclic GFR-binding peptide
SATSILYYVGRTPKVLRKHRVGRKPKV

SEQ ID NO: 126783 - protein, 27 aa, Artificial Sequence
  Cyclic GFR-binding peptide
EPISVLYLDSSNNVIKFKYEVGRKPKV

SEQ ID NO: 126784 - protein, 27 aa, Artificial Sequence
  Cyclic GFR-binding peptide
SATSILYYDSANNVVLRKHRVGRKPKV

SEQ ID NO: 126785 - protein, 27 aa, Artificial Sequence
  Cyclic GFR-binding peptide
SATSVLYYDDMGVPTLRKHRVGRKPKV

SEQ ID NO: 126786 - protein, 27 aa, Artificial Sequence
  Cyclic GFR-binding peptide
SPISVLYKDSSNNVILKYHYVGRKPKV

SEQ ID NO: 126787 - protein, 27 aa, Artificial Sequence
  Cyclic GFR-binding peptide
SPISILYKDSANNVVLKYHYVGRKPKV

SEQ ID NO: 126788 - protein, 27 aa, Artificial Sequence
  Cyclic GFR-binding peptide
EPISVLYLDDSSNVIKFKYEVGRKPKV

SEQ ID NO: 126789 - protein, 27 aa, Artificial Sequence
  Cyclic GFR-binding peptide
EPISILYLVGRKPKVKFKYEVGRKPKV

SEQ ID NO: 126790 - protein, 27 aa, Artificial Sequence
  Cyclic GFR-binding peptide
SATSMLYYDEYDKVVLRKHRVGRKPKV

SEQ ID NO: 126791 - protein, 27 aa, Artificial Sequence
  Cyclic GFR-binding peptide
EPISMLYLDENEKVVKFKYEVGRKPKV

SEQ ID NO: 126792 - protein, 27 aa, Artificial Sequence
  Cyclic GFR-binding peptide
EPISILYLDKGVVTYKFKYEVGRKPKV

SEQ ID NO: 126793 - protein, 27 aa, Artificial Sequence
  Cyclic GFR-binding peptide
SPINILYFDSANNVVYGKIPVGRKPKV

SEQ ID NO: 126794 - protein, 27 aa, Artificial Sequence
  Cyclic GFR-binding peptide
SPISMLYKNDKQQIILKYHYVGRKPKV

SEQ ID NO: 126795 - protein, 27 aa, Artificial Sequence
  Cyclic GFR-binding peptide
NAISILYFDSANNVVLKKYRVGRKPKV

SEQ ID NO: 126796 - protein, 27 aa, Artificial Sequence
  Cyclic GFR-binding peptide
SATSILYYDAANNVVLRKHRVGRKPKV

SEQ ID NO: 126797 - protein, 27 aa, Artificial Sequence
  Cyclic GFR-binding peptide
VGRKPKVSMEGIIIQQKDNMIQMTINS

SEQ ID NO: 126798 - protein, 27 aa, Artificial Sequence
  Cyclic GFR-binding peptide
VGRKPKVSMEGIIVNSSDDMIQVTINS

SEQ ID NO: 126799 - protein, 27 aa, Artificial Sequence
  Cyclic GFR-binding peptide
VGRKPKVSMEGLVKPKRGVMIQITINS

SEQ ID NO: 126800 - protein, 27 aa, Artificial Sequence
  Cyclic GFR-binding peptide
VGRKPKVSMEGLVVNNASDMIQITINS

SEQ ID NO: 126801 - protein, 29 aa, Artificial Sequence
  Cyclic GFR-binding peptide
VGRKPKVSMEGIFIPKKRVIEMIQVTINS

SEQ ID NO: 126802 - protein, 27 aa, Artificial Sequence
  Cyclic GFR-binding peptide
VGRKPKVSMEGILLVRGNDMIQMTINS

SEQ ID NO: 126803 - protein, 29 aa, Artificial Sequence
  Cyclic GFR-binding peptide
VGRKPKVSMEGILKPKKRVYEMIQVTINS

SEQ ID NO: 126804 - protein, 27 aa, Artificial Sequence
  Cyclic GFR-binding peptide
VGRKPKVSMEGLIKPTKGIMIQITINS

SEQ ID NO: 126805 - protein, 27 aa, Artificial Sequence
  Cyclic GFR-binding peptide
VGRKPKVSMEGLIVNSSDDMIQVTINS

SEQ ID NO: 126806 - protein, 29 aa, Artificial Sequence
  Cyclic GFR-binding peptide
VGRKPKVSMEGIHQGQHPKIRMIQMTINS

SEQ ID NO: 126807 - protein, 27 aa, Artificial Sequence
  Cyclic GFR-binding peptide
VGRKPKVSMEGIVVNNASDMIQITINS

SEQ ID NO: 126808 - protein, 29 aa, Artificial Sequence
  Cyclic GFR-binding peptide
VGRKPKVSMEGLLKPKKRVYEMIQVTINS

SEQ ID NO: 126809 - protein, 27 aa, Artificial Sequence
  Cyclic GFR-binding peptide
VGRKPKVSMEGIVKPKRGVMIQITINS

SEQ ID NO: 126810 - protein, 27 aa, Artificial Sequence
  Cyclic GFR-binding peptide
VGRKPKVSMEGIVKPTRGVMIQITINS

SEQ ID NO: 126811 - protein, 27 aa, Artificial Sequence
  Cyclic GFR-binding peptide
VGRKPKVSMEGLVVNNAADMIQITINS

SEQ ID NO: 126812 - protein, 27 aa, Artificial Sequence
  Cyclic GFR-binding peptide
VGRKPKVSMEGLLLVRGNDMIQMTINS

SEQ ID NO: 126813 - protein, 27 aa, Artificial Sequence
  Cyclic GFR-binding peptide
VGRKPKVSMEGIIKPTKGIMIQITINS

SEQ ID NO: 126814 - protein, 27 aa, Artificial Sequence
  Cyclic GFR-binding peptide
VGRKPKVSMEGLIIQQKDNMIQMTINS

SEQ ID NO: 126815 - protein, 29 aa, Artificial Sequence
  Cyclic GFR-binding peptide
VGRKPKVSMEGLHQGQHPKIRMIQMTINS

SEQ ID NO: 126816 - protein, 27 aa, Artificial Sequence
  Cyclic GFR-binding peptide
VGRKPKVSMEGIVVNNAADMIQITINS

SEQ ID NO: 126817 - protein, 29 aa, Artificial Sequence
  Cyclic GFR-binding peptide
VGRKPKVSMEGLFIPKKRVIEMIQVTINS

SEQ ID NO: 126818 - protein, 27 aa, Artificial Sequence
  Cyclic GFR-binding peptide
VGRKPKVSMEGLVKPTRGVMIQITINS

SEQ ID NO: 126819 - protein, 27 aa, Artificial Sequence
  Cyclic GFR-binding peptide
SNITMQIMNDKQQIIIGEMSVGRKPKV

SEQ ID NO: 126820 - protein, 27 aa, Artificial Sequence
  Cyclic GFR-binding peptide
SNITVQIMDDSSNVIIGEMSVGRKPKV

SEQ ID NO: 126821 - protein, 27 aa, Artificial Sequence
  Cyclic GFR-binding peptide
SNITIQIMVGRKPKVLGEMSVGRKPKV

SEQ ID NO: 126822 - protein, 27 aa, Artificial Sequence
  Cyclic GFR-binding peptide
SNITIQIMDSANNVVLGEMSVGRKPKV

SEQ ID NO: 126823 - protein, 29 aa, Artificial Sequence
  Cyclic GFR-binding peptide
SNITVQIMEIVRKKPIFIGEMSVGRKPKV

SEQ ID NO: 126824 - protein, 27 aa, Artificial Sequence
  Cyclic GFR-binding peptide
SNITMQIMDNGRVLLIGEMSVGRKPKV

SEQ ID NO: 126825 - protein, 29 aa, Artificial Sequence
  Cyclic GFR-binding peptide
SNITVQIMEYVRKKPKLIGEMSVGRKPKV

SEQ ID NO: 126826 - protein, 27 aa, Artificial Sequence
  Cyclic GFR-binding peptide
SNITIQIMIGKTPKILGEMSVGRKPKV

SEQ ID NO: 126827 - protein, 27 aa, Artificial Sequence
  Cyclic GFR-binding peptide
SNITVQIMDDSSNVILGEMSVGRKPKV

SEQ ID NO: 126828 - protein, 29 aa, Artificial Sequence
  Cyclic GFR-binding peptide
SNITMQIMRIKPHQGQHIGEMSVGRKPKV

SEQ ID NO: 126829 - protein, 27 aa, Artificial Sequence
  Cyclic GFR-binding peptide
SNITIQIMDSANNVVIGEMSVGRKPKV

SEQ ID NO: 126830 - protein, 29 aa, Artificial Sequence
  Cyclic GFR-binding peptide
SNITVQIMEYVRKKPKLLGEMSVGRKPKV

SEQ ID NO: 126831 - protein, 27 aa, Artificial Sequence
  Cyclic GFR-binding peptide
SNITIQIMVGRKPKVIGEMSVGRKPKV

SEQ ID NO: 126832 - protein, 27 aa, Artificial Sequence
  Cyclic GFR-binding peptide
SNITIQIMVGRTPKVIGEMSVGRKPKV

SEQ ID NO: 126833 - protein, 27 aa, Artificial Sequence
  Cyclic GFR-binding peptide
SNITIQIMDAANNVVLGEMSVGRKPKV

SEQ ID NO: 126834 - protein, 27 aa, Artificial Sequence
  Cyclic GFR-binding peptide
SNITMQIMDNGRVLLLGEMSVGRKPKV

SEQ ID NO: 126835 - protein, 27 aa, Artificial Sequence
  Cyclic GFR-binding peptide
SNITIQIMIGKTPKIIGEMSVGRKPKV

SEQ ID NO: 126836 - protein, 27 aa, Artificial Sequence
  Cyclic GFR-binding peptide
SNITMQIMNDKQQIILGEMSVGRKPKV

SEQ ID NO: 126837 - protein, 29 aa, Artificial Sequence
  Cyclic GFR-binding peptide
SNITMQIMRIKPHQGQHLGEMSVGRKPKV

SEQ ID NO: 126838 - protein, 27 aa, Artificial Sequence
  Cyclic GFR-binding peptide
SNITIQIMDAANNVVIGEMSVGRKPKV

SEQ ID NO: 126839 - protein, 29 aa, Artificial Sequence
  Cyclic GFR-binding peptide
SNITVQIMEIVRKKPIFLGEMSVGRKPKV

SEQ ID NO: 126840 - protein, 27 aa, Artificial Sequence
  Cyclic GFR-binding peptide
SNITIQIMVGRTPKVLGEMSVGRKPKV

SEQ ID NO: 126841 - protein, 27 aa, Artificial Sequence
  Cyclic GFR-binding peptide
VGRKPKVRYKKLIKPTKGIFYLISIAN

SEQ ID NO: 126842 - protein, 27 aa, Artificial Sequence
  Cyclic GFR-binding peptide
VGRKPKVQYNKLVVNKNEDLYLISIAS

SEQ ID NO: 126843 - protein, 27 aa, Artificial Sequence
  Cyclic GFR-binding peptide
VGRKPKVQYNKLVVNNAADLYLISIAS

SEQ ID NO: 126844 - protein, 27 aa, Artificial Sequence
  Cyclic GFR-binding peptide
VGRKPKVQYNKLIVNNSSDLYLVSIAS

SEQ ID NO: 126845 - protein, 27 aa, Artificial Sequence
  Cyclic GFR-binding peptide
VGRKPKVRYKKLVVKDYEDFYLMSIAN

SEQ ID NO: 126846 - protein, 27 aa, Artificial Sequence
  Cyclic GFR-binding peptide
VGRKPKVRYKKLVKPTRGVFYLISIAN

SEQ ID NO: 126847 - protein, 27 aa, Artificial Sequence
  Cyclic GFR-binding peptide
VGRKPKVQYNKLIIQQKDNLYLMSIAS

SEQ ID NO: 126848 - protein, 27 aa, Artificial Sequence
  Cyclic GFR-binding peptide
VGRKPKVQYNKLLLVRGNDLYLMSIAS

SEQ ID NO: 126849 - protein, 27 aa, Artificial Sequence
  Cyclic GFR-binding peptide
VGRKPKVQYNKLVKPTRGVLYLISIAS

SEQ ID NO: 126850 - protein, 27 aa, Artificial Sequence
  Cyclic GFR-binding peptide
VGRKPKVRYKKLVVKENEDFYLMSIAN

SEQ ID NO: 126851 - protein, 27 aa, Artificial Sequence
  Cyclic GFR-binding peptide
VGRKPKVRYKKLVVNNAADFYLISIAN

SEQ ID NO: 126852 - protein, 27 aa, Artificial Sequence
  Cyclic GFR-binding peptide
VGRKPKVQYNKLTPVGMDDLYLVSIAS

SEQ ID NO: 126853 - protein, 27 aa, Artificial Sequence
  Cyclic GFR-binding peptide
VGRKPKVRYKKLTPVGMDDFYLVSIAN

SEQ ID NO: 126854 - protein, 27 aa, Artificial Sequence
  Cyclic GFR-binding peptide
VGRKPKVRYKKLVKPKRGVFYLISIAN

SEQ ID NO: 126855 - protein, 27 aa, Artificial Sequence
  Cyclic GFR-binding peptide
VGRKPKVQYNKLVVKENEDLYLMSIAS

SEQ ID NO: 126856 - protein, 27 aa, Artificial Sequence
  Cyclic GFR-binding peptide
VGRKPKVRYKKLIIQQKDNFYLMSIAN

SEQ ID NO: 126857 - protein, 27 aa, Artificial Sequence
  Cyclic GFR-binding peptide
VGRKPKVQYNKLVKPKRGVLYLISIAS

SEQ ID NO: 126858 - protein, 27 aa, Artificial Sequence
  Cyclic GFR-binding peptide
VGRKPKVRYKKLIVNNSSDFYLVSIAN

SEQ ID NO: 126859 - protein, 27 aa, Artificial Sequence
  Cyclic GFR-binding peptide
VGRKPKVRYKKLYTVVGKDFYLISIAN

SEQ ID NO: 126860 - protein, 27 aa, Artificial Sequence
  Cyclic GFR-binding peptide
VGRKPKVRYKKLIVNSSDDFYLVSIAN

SEQ ID NO: 126861 - protein, 27 aa, Artificial Sequence
  Cyclic GFR-binding peptide
VGRKPKVRYKKLLLVRGNDFYLMSIAN

SEQ ID NO: 126862 - protein, 27 aa, Artificial Sequence
  Cyclic GFR-binding peptide
VGRKPKVQYNKLVVNNASDLYLISIAS

SEQ ID NO: 126863 - protein, 27 aa, Artificial Sequence
  Cyclic GFR-binding peptide
VGRKPKVQYNKLIKPTKGILYLISIAS

SEQ ID NO: 126864 - protein, 27 aa, Artificial Sequence
  Cyclic GFR-binding peptide
VGRKPKVRYKKLVVNKNEDFYLISIAN

SEQ ID NO: 126865 - protein, 27 aa, Artificial Sequence
  Cyclic GFR-binding peptide
VGRKPKVQYNKLYTVVGKDLYLISIAS

SEQ ID NO: 126866 - protein, 27 aa, Artificial Sequence
  Cyclic GFR-binding peptide
VGRKPKVQYNKLVVKDYEDLYLMSIAS

SEQ ID NO: 126867 - protein, 27 aa, Artificial Sequence
  Cyclic GFR-binding peptide
VGRKPKVRYKKLVVNNASDFYLISIAN

SEQ ID NO: 126868 - protein, 27 aa, Artificial Sequence
  Cyclic GFR-binding peptide
VGRKPKVQYNKLIVNSSDDLYLVSIAS

SEQ ID NO: 126869 - protein, 27 aa, Artificial Sequence
  Cyclic GFR-binding peptide
NAISILYFIGKTPKILKKYRVGRKPKV

SEQ ID NO: 126870 - protein, 27 aa, Artificial Sequence
  Cyclic GFR-binding peptide
SAISILYLDENKNVVLKNYQVGRKPKV

SEQ ID NO: 126871 - protein, 27 aa, Artificial Sequence
  Cyclic GFR-binding peptide
SAISILYLDAANNVVLKNYQVGRKPKV

SEQ ID NO: 126872 - protein, 27 aa, Artificial Sequence
  Cyclic GFR-binding peptide
SAISVLYLDSSNNVILKNYQVGRKPKV

SEQ ID NO: 126873 - protein, 27 aa, Artificial Sequence
  Cyclic GFR-binding peptide
NAISMLYFDEYDKVVLKKYRVGRKPKV

SEQ ID NO: 126874 - protein, 27 aa, Artificial Sequence
  Cyclic GFR-binding peptide
NAISILYFVGRTPKVLKKYRVGRKPKV

SEQ ID NO: 126875 - protein, 27 aa, Artificial Sequence
  Cyclic GFR-binding peptide
SAISMLYLNDKQQIILKNYQVGRKPKV

SEQ ID NO: 126876 - protein, 27 aa, Artificial Sequence
  Cyclic GFR-binding peptide
SAISMLYLDNGRVLLLKNYQVGRKPKV

SEQ ID NO: 126877 - protein, 27 aa, Artificial Sequence
  Cyclic GFR-binding peptide
SAISILYLVGRTPKVLKNYQVGRKPKV

SEQ ID NO: 126878 - protein, 27 aa, Artificial Sequence
  Cyclic GFR-binding peptide
NAISMLYFDENEKVVLKKYRVGRKPKV

SEQ ID NO: 126879 - protein, 27 aa, Artificial Sequence
  Cyclic GFR-binding peptide
NAISILYFDAANNVVLKKYRVGRKPKV

SEQ ID NO: 126880 - protein, 27 aa, Artificial Sequence
  Cyclic GFR-binding peptide
SAISVLYLDDMGVPTLKNYQVGRKPKV

SEQ ID NO: 126881 - protein, 27 aa, Artificial Sequence
  Cyclic GFR-binding peptide
NAISVLYFDDMGVPTLKKYRVGRKPKV

SEQ ID NO: 126882 - protein, 27 aa, Artificial Sequence
  Cyclic GFR-binding peptide
NAISILYFVGRKPKVLKKYRVGRKPKV

SEQ ID NO: 126883 - protein, 27 aa, Artificial Sequence
  Cyclic GFR-binding peptide
SAISMLYLDENEKVVLKNYQVGRKPKV

SEQ ID NO: 126884 - protein, 27 aa, Artificial Sequence
  Cyclic GFR-binding peptide
NAISMLYFNDKQQIILKKYRVGRKPKV

SEQ ID NO: 126885 - protein, 27 aa, Artificial Sequence
  Cyclic GFR-binding peptide
SAISILYLVGRKPKVLKNYQVGRKPKV

SEQ ID NO: 126886 - protein, 27 aa, Artificial Sequence
  Cyclic GFR-binding peptide
NAISVLYFDSSNNVILKKYRVGRKPKV

SEQ ID NO: 126887 - protein, 27 aa, Artificial Sequence
  Cyclic GFR-binding peptide
NAISILYFDKGVVTYLKKYRVGRKPKV

SEQ ID NO: 126888 - protein, 27 aa, Artificial Sequence
  Cyclic GFR-binding peptide
NAISVLYFDDSSNVILKKYRVGRKPKV

SEQ ID NO: 126889 - protein, 27 aa, Artificial Sequence
  Cyclic GFR-binding peptide
NAISMLYFDNGRVLLLKKYRVGRKPKV

SEQ ID NO: 126890 - protein, 27 aa, Artificial Sequence
  Cyclic GFR-binding peptide
SAISILYLDSANNVVLKNYQVGRKPKV

SEQ ID NO: 126891 - protein, 27 aa, Artificial Sequence
  Cyclic GFR-binding peptide
SAISILYLIGKTPKILKNYQVGRKPKV

SEQ ID NO: 126892 - protein, 27 aa, Artificial Sequence
  Cyclic GFR-binding peptide
NAISILYFDENKNVVLKKYRVGRKPKV

SEQ ID NO: 126893 - protein, 27 aa, Artificial Sequence
  Cyclic GFR-binding peptide
SAISILYLDKGVVTYLKNYQVGRKPKV

SEQ ID NO: 126894 - protein, 27 aa, Artificial Sequence
  Cyclic GFR-binding peptide
SAISMLYLDEYDKVVLKNYQVGRKPKV

SEQ ID NO: 126895 - protein, 27 aa, Artificial Sequence
  Cyclic GFR-binding peptide
NAISILYFDSANNVVLKKYRVGRKPKV

SEQ ID NO: 126896 - protein, 27 aa, Artificial Sequence
  Cyclic GFR-binding peptide
SAISVLYLDDSSNVILKNYQVGRKPKV

SEQ ID NO: 126897 - protein, 29 aa, Artificial Sequence
  Cyclic GFR-binding peptide
VGRKPKVVTAKKLKPKKRVYEIKRVQVPR

SEQ ID NO: 126898 - protein, 29 aa, Artificial Sequence
  Cyclic GFR-binding peptide
VGRKPKVVQVEKLKPKKRVYEVKAVKVSR

SEQ ID NO: 126899 - protein, 27 aa, Artificial Sequence
  Cyclic GFR-binding peptide
VGRKPKVVTAKKVKPTRGVIKRIQVPR

SEQ ID NO: 126900 - protein, 29 aa, Artificial Sequence
  Cyclic GFR-binding peptide
VGRKPKVVQVEKFIPKKRVIEVKAVKVSR

SEQ ID NO: 126901 - protein, 29 aa, Artificial Sequence
  Cyclic GFR-binding peptide
VGRKPKVVQVEKHQGQHPKIRVKAMKVSR

SEQ ID NO: 126902 - protein, 29 aa, Artificial Sequence
  Cyclic GFR-binding peptide
VGRKPKVVTAKKHQGQHPKIRIKRMQVPR

SEQ ID NO: 126903 - protein, 27 aa, Artificial Sequence
  Cyclic GFR-binding peptide
VGRKPKVVTAKKIKPTKGIIKRIQVPR

SEQ ID NO: 126904 - protein, 27 aa, Artificial Sequence
  Cyclic GFR-binding peptide
VGRKPKVVQVEKVKPKRGVVKAIKVSR

SEQ ID NO: 126905 - protein, 27 aa, Artificial Sequence
  Cyclic GFR-binding peptide
VGRKPKVVTAKKVKPKRGVIKRIQVPR

SEQ ID NO: 126906 - protein, 27 aa, Artificial Sequence
  Cyclic GFR-binding peptide
VGRKPKVVQVEKIKPTKGIVKAIKVSR

SEQ ID NO: 126907 - protein, 27 aa, Artificial Sequence
  Cyclic GFR-binding peptide
VGRKPKVVQVEKVKPTRGVVKAIKVSR

SEQ ID NO: 126908 - protein, 29 aa, Artificial Sequence
  Cyclic GFR-binding peptide
VGRKPKVVTAKKFIPKKRVIEIKRVQVPR

SEQ ID NO: 126909 - protein, 29 aa, Artificial Sequence
  Cyclic GFR-binding peptide
RPVQVRKIEYVRKKPKLKKATVVGRKPKV

SEQ ID NO: 126910 - protein, 29 aa, Artificial Sequence
  Cyclic GFR-binding peptide
RSVKVAKVEYVRKKPKLKEVQVVGRKPKV

SEQ ID NO: 126911 - protein, 27 aa, Artificial Sequence
  Cyclic GFR-binding peptide
RPVQIRKIVGRTPKVKKATVVGRKPKV

SEQ ID NO: 126912 - protein, 29 aa, Artificial Sequence
  Cyclic GFR-binding peptide
RSVKVAKVEIVRKKPIFKEVQVVGRKPKV

SEQ ID NO: 126913 - protein, 29 aa, Artificial Sequence
  Cyclic GFR-binding peptide
RSVKMAKVRIKPHQGQHKEVQVVGRKPKV

SEQ ID NO: 126914 - protein, 29 aa, Artificial Sequence
  Cyclic GFR-binding peptide
RPVQMRKIRIKPHQGQHKKATVVGRKPKV

SEQ ID NO: 126915 - protein, 27 aa, Artificial Sequence
  Cyclic GFR-binding peptide
RPVQIRKIIGKTPKIKKATVVGRKPKV

SEQ ID NO: 126916 - protein, 27 aa, Artificial Sequence
  Cyclic GFR-binding peptide
RSVKIAKVVGRKPKVKEVQVVGRKPKV

SEQ ID NO: 126917 - protein, 27 aa, Artificial Sequence
  Cyclic GFR-binding peptide
RPVQIRKIVGRKPKVKKATVVGRKPKV

SEQ ID NO: 126918 - protein, 27 aa, Artificial Sequence
  Cyclic GFR-binding peptide
RSVKIAKVIGKTPKIKEVQVVGRKPKV

SEQ ID NO: 126919 - protein, 27 aa, Artificial Sequence
  Cyclic GFR-binding peptide
RSVKIAKVVGRTPKVKEVQVVGRKPKV

SEQ ID NO: 126920 - protein, 29 aa, Artificial Sequence
  Cyclic GFR-binding peptide
RPVQVRKIEIVRKKPIFKKATVVGRKPKV

SEQ ID NO: 126921 - protein, 27 aa, Artificial Sequence
  Cyclic GFR-binding peptide
IGKTPKIRYKKLIKPTKGIFYLISIAN

SEQ ID NO: 126922 - protein, 29 aa, Artificial Sequence
  Cyclic GFR-binding peptide
IGKTPKIRHKRLFIPKKRVIEYYLVSTAS

SEQ ID NO: 126923 - protein, 27 aa, Artificial Sequence
  Cyclic GFR-binding peptide
IGKTPKIYHYKLVVKDYEDKYLMSIPS

SEQ ID NO: 126924 - protein, 27 aa, Artificial Sequence
  Cyclic GFR-binding peptide
IGKTPKIQYNKLIVNNSSDLYLVSIAS

SEQ ID NO: 126925 - protein, 27 aa, Artificial Sequence
  Cyclic GFR-binding peptide
IGKTPKIRYKKLVVKDYEDFYLMSIAN

SEQ ID NO: 126926 - protein, 27 aa, Artificial Sequence
  Cyclic GFR-binding peptide
IGKTPKIRYKKLVKPTRGVFYLISIAN

SEQ ID NO: 126927 - protein, 27 aa, Artificial Sequence
  Cyclic GFR-binding peptide
IGKTPKIRHKRLVVKENEDYYLMSTAS

SEQ ID NO: 126928 - protein, 27 aa, Artificial Sequence
  Cyclic GFR-binding peptide
IGKTPKIYHYKLIKPTKGIKYLISIPS

SEQ ID NO: 126929 - protein, 29 aa, Artificial Sequence
  Cyclic GFR-binding peptide
IGKTPKIRYKKLFIPKKRVIEFYLVSIAN

SEQ ID NO: 126930 - protein, 27 aa, Artificial Sequence
  Cyclic GFR-binding peptide
IGKTPKIYHYKLVVKENEDKYLMSIPS

SEQ ID NO: 126931 - protein, 27 aa, Artificial Sequence
  Cyclic GFR-binding peptide
IGKTPKIRHKRLVKPKRGVYYLISTAS

SEQ ID NO: 126932 - protein, 27 aa, Artificial Sequence
  Cyclic GFR-binding peptide
IGKTPKIYHYKLVKPKRGVKYLISIPS

SEQ ID NO: 126933 - protein, 29 aa, Artificial Sequence
  Cyclic GFR-binding peptide
IGKTPKIQYNKLFIPKKRVIELYLVSIAS

SEQ ID NO: 126934 - protein, 27 aa, Artificial Sequence
  Cyclic GFR-binding peptide
IGKTPKIQYNKLVKPTRGVLYLISIAS

SEQ ID NO: 126935 - protein, 27 aa, Artificial Sequence
  Cyclic GFR-binding peptide
IGKTPKIRYKKLVVKENEDFYLMSIAN

SEQ ID NO: 126936 - protein, 27 aa, Artificial Sequence
  Cyclic GFR-binding peptide
IGKTPKIQYNKLTPVGMDDLYLVSIAS

SEQ ID NO: 126937 - protein, 27 aa, Artificial Sequence
  Cyclic GFR-binding peptide
IGKTPKIRYKKLTPVGMDDFYLVSIAN

SEQ ID NO: 126938 - protein, 27 aa, Artificial Sequence
  Cyclic GFR-binding peptide
IGKTPKIRYKKLVKPKRGVFYLISIAN

SEQ ID NO: 126939 - protein, 27 aa, Artificial Sequence
  Cyclic GFR-binding peptide
IGKTPKIQYNKLVVKENEDLYLMSIAS

SEQ ID NO: 126940 - protein, 27 aa, Artificial Sequence
  Cyclic GFR-binding peptide
IGKTPKIYHYKLIVNSSDDKYLVSIPS

SEQ ID NO: 126941 - protein, 27 aa, Artificial Sequence
  Cyclic GFR-binding peptide
IGKTPKIQYNKLVKPKRGVLYLISIAS

SEQ ID NO: 126942 - protein, 27 aa, Artificial Sequence
  Cyclic GFR-binding peptide
IGKTPKIRYKKLIVNNSSDFYLVSIAN

SEQ ID NO: 126943 - protein, 27 aa, Artificial Sequence
  Cyclic GFR-binding peptide
IGKTPKIRYKKLIVNSSDDFYLVSIAN

SEQ ID NO: 126944 - protein, 27 aa, Artificial Sequence
  Cyclic GFR-binding peptide
IGKTPKIRHKRLVKPTRGVYYLISTAS

SEQ ID NO: 126945 - protein, 29 aa, Artificial Sequence
  Cyclic GFR-binding peptide
IGKTPKIYHYKLFIPKKRVIEKYLVSIPS

SEQ ID NO: 126946 - protein, 27 aa, Artificial Sequence
  Cyclic GFR-binding peptide
IGKTPKIRHKRLIKPTKGIYYLISTAS

SEQ ID NO: 126947 - protein, 27 aa, Artificial Sequence
  Cyclic GFR-binding peptide
IGKTPKIRHKRLTPVGMDDYYLVSTAS

SEQ ID NO: 126948 - protein, 27 aa, Artificial Sequence
  Cyclic GFR-binding peptide
IGKTPKIYHYKLTPVGMDDKYLVSIPS

SEQ ID NO: 126949 - protein, 27 aa, Artificial Sequence
  Cyclic GFR-binding peptide
IGKTPKIYHYKLIVNNSSDKYLVSIPS

SEQ ID NO: 126950 - protein, 27 aa, Artificial Sequence
  Cyclic GFR-binding peptide
IGKTPKIRHKRLIVNNSSDYYLVSTAS

SEQ ID NO: 126951 - protein, 27 aa, Artificial Sequence
  Cyclic GFR-binding peptide
IGKTPKIYHYKLVKPTRGVKYLISIPS

SEQ ID NO: 126952 - protein, 27 aa, Artificial Sequence
  Cyclic GFR-binding peptide
IGKTPKIRHKRLIVNSSDDYYLVSTAS

SEQ ID NO: 126953 - protein, 27 aa, Artificial Sequence
  Cyclic GFR-binding peptide
IGKTPKIRHKRLVVKDYEDYYLMSTAS

SEQ ID NO: 126954 - protein, 27 aa, Artificial Sequence
  Cyclic GFR-binding peptide
IGKTPKIQYNKLIKPTKGILYLISIAS

SEQ ID NO: 126955 - protein, 27 aa, Artificial Sequence
  Cyclic GFR-binding peptide
IGKTPKIQYNKLVVKDYEDLYLMSIAS

SEQ ID NO: 126956 - protein, 27 aa, Artificial Sequence
  Cyclic GFR-binding peptide
IGKTPKIQYNKLIVNSSDDLYLVSIAS

SEQ ID NO: 126957 - protein, 27 aa, Artificial Sequence
  Cyclic GFR-binding peptide
NAISILYFIGKTPKILKKYRIGKTPKI

SEQ ID NO: 126958 - protein, 29 aa, Artificial Sequence
  Cyclic GFR-binding peptide
SATSVLYYEIVRKKPIFLRKHRIGKTPKI

SEQ ID NO: 126959 - protein, 27 aa, Artificial Sequence
  Cyclic GFR-binding peptide
SPISMLYKDEYDKVVLKYHYIGKTPKI

SEQ ID NO: 126960 - protein, 27 aa, Artificial Sequence
  Cyclic GFR-binding peptide
SAISVLYLDSSNNVILKNYQIGKTPKI

SEQ ID NO: 126961 - protein, 27 aa, Artificial Sequence
  Cyclic GFR-binding peptide
NAISMLYFDEYDKVVLKKYRIGKTPKI

SEQ ID NO: 126962 - protein, 27 aa, Artificial Sequence
  Cyclic GFR-binding peptide
NAISILYFVGRTPKVLKKYRIGKTPKI

SEQ ID NO: 126963 - protein, 27 aa, Artificial Sequence
  Cyclic GFR-binding peptide
SATSMLYYDENEKVVLRKHRIGKTPKI

SEQ ID NO: 126964 - protein, 27 aa, Artificial Sequence
  Cyclic GFR-binding peptide
SPISILYKIGKTPKILKYHYIGKTPKI

SEQ ID NO: 126965 - protein, 29 aa, Artificial Sequence
  Cyclic GFR-binding peptide
NAISVLYFEIVRKKPIFLKKYRIGKTPKI

SEQ ID NO: 126966 - protein, 27 aa, Artificial Sequence
  Cyclic GFR-binding peptide
SPISMLYKDENEKVVLKYHYIGKTPKI

SEQ ID NO: 126967 - protein, 27 aa, Artificial Sequence
  Cyclic GFR-binding peptide
SATSILYYVGRKPKVLRKHRIGKTPKI

SEQ ID NO: 126968 - protein, 27 aa, Artificial Sequence
  Cyclic GFR-binding peptide
SPISILYKVGRKPKVLKYHYIGKTPKI

SEQ ID NO: 126969 - protein, 29 aa, Artificial Sequence
  Cyclic GFR-binding peptide
SAISVLYLEIVRKKPIFLKNYQIGKTPKI

SEQ ID NO: 126970 - protein, 27 aa, Artificial Sequence
  Cyclic GFR-binding peptide
SAISILYLVGRTPKVLKNYQIGKTPKI

SEQ ID NO: 126971 - protein, 27 aa, Artificial Sequence
  Cyclic GFR-binding peptide
NAISMLYFDENEKVVLKKYRIGKTPKI

SEQ ID NO: 126972 - protein, 27 aa, Artificial Sequence
  Cyclic GFR-binding peptide
SAISVLYLDDMGVPTLKNYQIGKTPKI

SEQ ID NO: 126973 - protein, 27 aa, Artificial Sequence
  Cyclic GFR-binding peptide
NAISVLYFDDMGVPTLKKYRIGKTPKI

SEQ ID NO: 126974 - protein, 27 aa, Artificial Sequence
  Cyclic GFR-binding peptide
NAISILYFVGRKPKVLKKYRIGKTPKI

SEQ ID NO: 126975 - protein, 27 aa, Artificial Sequence
  Cyclic GFR-binding peptide
SAISMLYLDENEKVVLKNYQIGKTPKI

SEQ ID NO: 126976 - protein, 27 aa, Artificial Sequence
  Cyclic GFR-binding peptide
SPISVLYKDDSSNVILKYHYIGKTPKI

SEQ ID NO: 126977 - protein, 27 aa, Artificial Sequence
  Cyclic GFR-binding peptide
SAISILYLVGRKPKVLKNYQIGKTPKI

SEQ ID NO: 126978 - protein, 27 aa, Artificial Sequence
  Cyclic GFR-binding peptide
NAISVLYFDSSNNVILKKYRIGKTPKI

SEQ ID NO: 126979 - protein, 27 aa, Artificial Sequence
  Cyclic GFR-binding peptide
NAISVLYFDDSSNVILKKYRIGKTPKI

SEQ ID NO: 126980 - protein, 27 aa, Artificial Sequence
  Cyclic GFR-binding peptide
SATSILYYVGRTPKVLRKHRIGKTPKI

SEQ ID NO: 126981 - protein, 29 aa, Artificial Sequence
  Cyclic GFR-binding peptide
SPISVLYKEIVRKKPIFLKYHYIGKTPKI

SEQ ID NO: 126982 - protein, 27 aa, Artificial Sequence
  Cyclic GFR-binding peptide
SATSILYYIGKTPKILRKHRIGKTPKI

SEQ ID NO: 126983 - protein, 27 aa, Artificial Sequence
  Cyclic GFR-binding peptide
SATSVLYYDDMGVPTLRKHRIGKTPKI

SEQ ID NO: 126984 - protein, 27 aa, Artificial Sequence
  Cyclic GFR-binding peptide
SPISVLYKDDMGVPTLKYHYIGKTPKI

SEQ ID NO: 126985 - protein, 27 aa, Artificial Sequence
  Cyclic GFR-binding peptide
SPISVLYKDSSNNVILKYHYIGKTPKI

SEQ ID NO: 126986 - protein, 27 aa, Artificial Sequence
  Cyclic GFR-binding peptide
SATSVLYYDSSNNVILRKHRIGKTPKI

SEQ ID NO: 126987 - protein, 27 aa, Artificial Sequence
  Cyclic GFR-binding peptide
SPISILYKVGRTPKVLKYHYIGKTPKI

SEQ ID NO: 126988 - protein, 27 aa, Artificial Sequence
  Cyclic GFR-binding peptide
SATSVLYYDDSSNVILRKHRIGKTPKI

SEQ ID NO: 126989 - protein, 27 aa, Artificial Sequence
  Cyclic GFR-binding peptide
SATSMLYYDEYDKVVLRKHRIGKTPKI

SEQ ID NO: 126990 - protein, 27 aa, Artificial Sequence
  Cyclic GFR-binding peptide
SAISILYLIGKTPKILKNYQIGKTPKI

SEQ ID NO: 126991 - protein, 27 aa, Artificial Sequence
  Cyclic GFR-binding peptide
SAISMLYLDEYDKVVLKNYQIGKTPKI

SEQ ID NO: 126992 - protein, 27 aa, Artificial Sequence
  Cyclic GFR-binding peptide
SAISVLYLDDSSNVILKNYQIGKTPKI

SEQ ID NO: 126993 - protein, 27 aa, Artificial Sequence
  Cyclic GFR-binding peptide
IGKTPKIRYKKLIKPTKGIFYLISIAN

SEQ ID NO: 126994 - protein, 27 aa, Artificial Sequence
  Cyclic GFR-binding peptide
IGKTPKINSLQEVVKDYEDYYLMTLPE

SEQ ID NO: 126995 - protein, 27 aa, Artificial Sequence
  Cyclic GFR-binding peptide
IGKTPKINSLQEIKPTKGIYYVIPLPE

SEQ ID NO: 126996 - protein, 27 aa, Artificial Sequence
  Cyclic GFR-binding peptide
IGKTPKINSLQEVKPKRGVYYLITLPE

SEQ ID NO: 126997 - protein, 27 aa, Artificial Sequence
  Cyclic GFR-binding peptide
IGKTPKINSLQEVKPTRGVYYVIPLPE

SEQ ID NO: 126998 - protein, 27 aa, Artificial Sequence
  Cyclic GFR-binding peptide
IGKTPKIRYKKLVVKDYEDFYLMSIAN

SEQ ID NO: 126999 - protein, 27 aa, Artificial Sequence
  Cyclic GFR-binding peptide
IGKTPKIEYQKYIVNSSDDIFLVSIPS

SEQ ID NO: 127000 - protein, 27 aa, Artificial Sequence
  Cyclic GFR-binding peptide
IGKTPKIEYQKYVKPTRGVIFLISIPS

SEQ ID NO: 127001 - protein, 27 aa, Artificial Sequence
  Cyclic GFR-binding peptide
IGKTPKINSLQEVVKENEDYYLMTLPE

SEQ ID NO: 127002 - protein, 27 aa, Artificial Sequence
  Cyclic GFR-binding peptide
IGKTPKIRYKKLVKPTRGVFYLISIAN

SEQ ID NO: 127003 - protein, 27 aa, Artificial Sequence
  Cyclic GFR-binding peptide
IGKTPKINSLQEVVNNASDYYLITLPE

SEQ ID NO: 127004 - protein, 27 aa, Artificial Sequence
  Cyclic GFR-binding peptide
IGKTPKINSLQEVKPKRGVYYVIPLPE

SEQ ID NO: 127005 - protein, 27 aa, Artificial Sequence
  Cyclic GFR-binding peptide
IGKTPKINSLQEVVNNASDYYVIPLPE

SEQ ID NO: 127006 - protein, 27 aa, Artificial Sequence
  Cyclic GFR-binding peptide
IGKTPKINSLQEVKPTRGVYYLITLPE

SEQ ID NO: 127007 - protein, 27 aa, Artificial Sequence
  Cyclic GFR-binding peptide
IGKTPKIQYNKLVKPTRGVLYLISIAS

SEQ ID NO: 127008 - protein, 27 aa, Artificial Sequence
  Cyclic GFR-binding peptide
IGKTPKIRYKKLVVKENEDFYLMSIAN

SEQ ID NO: 127009 - protein, 27 aa, Artificial Sequence
  Cyclic GFR-binding peptide
IGKTPKIEYQKYIKPTKGIIFLISIPS

SEQ ID NO: 127010 - protein, 27 aa, Artificial Sequence
  Cyclic GFR-binding peptide
IGKTPKIEYQKYVVNNASDIFLISIPS

SEQ ID NO: 127011 - protein, 27 aa, Artificial Sequence
  Cyclic GFR-binding peptide
IGKTPKIRYKKLVKPKRGVFYLISIAN

SEQ ID NO: 127012 - protein, 27 aa, Artificial Sequence
  Cyclic GFR-binding peptide
IGKTPKINSLQEIVNSSDDYYVVPLPE

SEQ ID NO: 127013 - protein, 27 aa, Artificial Sequence
  Cyclic GFR-binding peptide
IGKTPKINSLQEVVKDYEDYYVMPLPE

SEQ ID NO: 127014 - protein, 27 aa, Artificial Sequence
  Cyclic GFR-binding peptide
IGKTPKIQYNKLVVKENEDLYLMSIAS

SEQ ID NO: 127015 - protein, 27 aa, Artificial Sequence
  Cyclic GFR-binding peptide
IGKTPKIEYQKYVVKENEDIFLMSIPS

SEQ ID NO: 127016 - protein, 27 aa, Artificial Sequence
  Cyclic GFR-binding peptide
IGKTPKIQYNKLVKPKRGVLYLISIAS

SEQ ID NO: 127017 - protein, 27 aa, Artificial Sequence
  Cyclic GFR-binding peptide
IGKTPKIRYKKLIVNSSDDFYLVSIAN

SEQ ID NO: 127018 - protein, 27 aa, Artificial Sequence
  Cyclic GFR-binding peptide
IGKTPKINSLQEVVKENEDYYVMPLPE

SEQ ID NO: 127019 - protein, 27 aa, Artificial Sequence
  Cyclic GFR-binding peptide
IGKTPKIEYQKYVVKDYEDIFLMSIPS

SEQ ID NO: 127020 - protein, 27 aa, Artificial Sequence
  Cyclic GFR-binding peptide
IGKTPKIQYNKLVVNNASDLYLISIAS

SEQ ID NO: 127021 - protein, 27 aa, Artificial Sequence
  Cyclic GFR-binding peptide
IGKTPKIQYNKLIKPTKGILYLISIAS

SEQ ID NO: 127022 - protein, 27 aa, Artificial Sequence
  Cyclic GFR-binding peptide
IGKTPKINSLQEIKPTKGIYYLITLPE

SEQ ID NO: 127023 - protein, 27 aa, Artificial Sequence
  Cyclic GFR-binding peptide
IGKTPKIEYQKYVKPKRGVIFLISIPS

SEQ ID NO: 127024 - protein, 27 aa, Artificial Sequence
  Cyclic GFR-binding peptide
IGKTPKIQYNKLVVKDYEDLYLMSIAS

SEQ ID NO: 127025 - protein, 27 aa, Artificial Sequence
  Cyclic GFR-binding peptide
IGKTPKIRYKKLVVNNASDFYLISIAN

SEQ ID NO: 127026 - protein, 27 aa, Artificial Sequence
  Cyclic GFR-binding peptide
IGKTPKINSLQEIVNSSDDYYLVTLPE

SEQ ID NO: 127027 - protein, 27 aa, Artificial Sequence
  Cyclic GFR-binding peptide
IGKTPKIQYNKLIVNSSDDLYLVSIAS

SEQ ID NO: 127028 - protein, 27 aa, Artificial Sequence
  Cyclic GFR-binding peptide
NAISILYFIGKTPKILKKYRIGKTPKI

SEQ ID NO: 127029 - protein, 27 aa, Artificial Sequence
  Cyclic GFR-binding peptide
EPLTMLYYDEYDKVVEQLSNIGKTPKI

SEQ ID NO: 127030 - protein, 27 aa, Artificial Sequence
  Cyclic GFR-binding peptide
EPLPIVYYIGKTPKIEQLSNIGKTPKI

SEQ ID NO: 127031 - protein, 27 aa, Artificial Sequence
  Cyclic GFR-binding peptide
EPLTILYYVGRKPKVEQLSNIGKTPKI

SEQ ID NO: 127032 - protein, 27 aa, Artificial Sequence
  Cyclic GFR-binding peptide
EPLPIVYYVGRTPKVEQLSNIGKTPKI

SEQ ID NO: 127033 - protein, 27 aa, Artificial Sequence
  Cyclic GFR-binding peptide
NAISMLYFDEYDKVVLKKYRIGKTPKI

SEQ ID NO: 127034 - protein, 27 aa, Artificial Sequence
  Cyclic GFR-binding peptide
SPISVLFIDDSSNVIYKQYEIGKTPKI

SEQ ID NO: 127035 - protein, 27 aa, Artificial Sequence
  Cyclic GFR-binding peptide
SPISILFIVGRTPKVYKQYEIGKTPKI

SEQ ID NO: 127036 - protein, 27 aa, Artificial Sequence
  Cyclic GFR-binding peptide
EPLTMLYYDENEKVVEQLSNIGKTPKI

SEQ ID NO: 127037 - protein, 27 aa, Artificial Sequence
  Cyclic GFR-binding peptide
NAISILYFVGRTPKVLKKYRIGKTPKI

SEQ ID NO: 127038 - protein, 27 aa, Artificial Sequence
  Cyclic GFR-binding peptide
EPLTILYYDSANNVVEQLSNIGKTPKI

SEQ ID NO: 127039 - protein, 27 aa, Artificial Sequence
  Cyclic GFR-binding peptide
EPLPIVYYVGRKPKVEQLSNIGKTPKI

SEQ ID NO: 127040 - protein, 27 aa, Artificial Sequence
  Cyclic GFR-binding peptide
EPLPIVYYDSANNVVEQLSNIGKTPKI

SEQ ID NO: 127041 - protein, 27 aa, Artificial Sequence
  Cyclic GFR-binding peptide
EPLTILYYVGRTPKVEQLSNIGKTPKI

SEQ ID NO: 127042 - protein, 27 aa, Artificial Sequence
  Cyclic GFR-binding peptide
SAISILYLVGRTPKVLKNYQIGKTPKI

SEQ ID NO: 127043 - protein, 27 aa, Artificial Sequence
  Cyclic GFR-binding peptide
NAISMLYFDENEKVVLKKYRIGKTPKI

SEQ ID NO: 127044 - protein, 27 aa, Artificial Sequence
  Cyclic GFR-binding peptide
SPISILFIIGKTPKIYKQYEIGKTPKI

SEQ ID NO: 127045 - protein, 27 aa, Artificial Sequence
  Cyclic GFR-binding peptide
SPISILFIDSANNVVYKQYEIGKTPKI

SEQ ID NO: 127046 - protein, 27 aa, Artificial Sequence
  Cyclic GFR-binding peptide
NAISILYFVGRKPKVLKKYRIGKTPKI

SEQ ID NO: 127047 - protein, 27 aa, Artificial Sequence
  Cyclic GFR-binding peptide
EPLPVVYYDDSSNVIEQLSNIGKTPKI

SEQ ID NO: 127048 - protein, 27 aa, Artificial Sequence
  Cyclic GFR-binding peptide
EPLPMVYYDEYDKVVEQLSNIGKTPKI

SEQ ID NO: 127049 - protein, 27 aa, Artificial Sequence
  Cyclic GFR-binding peptide
SAISMLYLDENEKVVLKNYQIGKTPKI

SEQ ID NO: 127050 - protein, 27 aa, Artificial Sequence
  Cyclic GFR-binding peptide
SPISMLFIDENEKVVYKQYEIGKTPKI

SEQ ID NO: 127051 - protein, 27 aa, Artificial Sequence
  Cyclic GFR-binding peptide
SAISILYLVGRKPKVLKNYQIGKTPKI

SEQ ID NO: 127052 - protein, 27 aa, Artificial Sequence
  Cyclic GFR-binding peptide
NAISVLYFDDSSNVILKKYRIGKTPKI

SEQ ID NO: 127053 - protein, 27 aa, Artificial Sequence
  Cyclic GFR-binding peptide
EPLPMVYYDENEKVVEQLSNIGKTPKI

SEQ ID NO: 127054 - protein, 27 aa, Artificial Sequence
  Cyclic GFR-binding peptide
SPISMLFIDEYDKVVYKQYEIGKTPKI

SEQ ID NO: 127055 - protein, 27 aa, Artificial Sequence
  Cyclic GFR-binding peptide
SAISILYLDSANNVVLKNYQIGKTPKI

SEQ ID NO: 127056 - protein, 27 aa, Artificial Sequence
  Cyclic GFR-binding peptide
SAISILYLIGKTPKILKNYQIGKTPKI

SEQ ID NO: 127057 - protein, 27 aa, Artificial Sequence
  Cyclic GFR-binding peptide
EPLTILYYIGKTPKIEQLSNIGKTPKI

SEQ ID NO: 127058 - protein, 27 aa, Artificial Sequence
  Cyclic GFR-binding peptide
SPISILFIVGRKPKVYKQYEIGKTPKI

SEQ ID NO: 127059 - protein, 27 aa, Artificial Sequence
  Cyclic GFR-binding peptide
SAISMLYLDEYDKVVLKNYQIGKTPKI

SEQ ID NO: 127060 - protein, 27 aa, Artificial Sequence
  Cyclic GFR-binding peptide
NAISILYFDSANNVVLKKYRIGKTPKI

SEQ ID NO: 127061 - protein, 27 aa, Artificial Sequence
  Cyclic GFR-binding peptide
EPLTVLYYDDSSNVIEQLSNIGKTPKI

SEQ ID NO: 127062 - protein, 27 aa, Artificial Sequence
  Cyclic GFR-binding peptide
SAISVLYLDDSSNVILKNYQIGKTPKI

SEQ ID NO: 127063 - protein, 29 aa, Artificial Sequence
  Cyclic GFR-binding peptide
IGKTPKIVTAKKLKPKKRVYEIKRVQVPR

SEQ ID NO: 127064 - protein, 29 aa, Artificial Sequence
  Cyclic GFR-binding peptide
IGKTPKIVQVEKLKPKKRVYEVKAVKVSR

SEQ ID NO: 127065 - protein, 29 aa, Artificial Sequence
  Cyclic GFR-binding peptide
IGKTPKIVQVEKFIPKKRVIEVKAVKVSR

SEQ ID NO: 127066 - protein, 29 aa, Artificial Sequence
  Cyclic GFR-binding peptide
IGKTPKIVQVEKHQGQHPKIRVKAMKVSR

SEQ ID NO: 127067 - protein, 29 aa, Artificial Sequence
  Cyclic GFR-binding peptide
IGKTPKIVTAKKHQGQHPKIRIKRMQVPR

SEQ ID NO: 127068 - protein, 29 aa, Artificial Sequence
  Cyclic GFR-binding peptide
IGKTPKISMEGLLKPKKRVYEMIQVTINS

SEQ ID NO: 127069 - protein, 29 aa, Artificial Sequence
  Cyclic GFR-binding peptide
IGKTPKISMEGIFIPKKRVIEMIQVTINS

SEQ ID NO: 127070 - protein, 29 aa, Artificial Sequence
  Cyclic GFR-binding peptide
IGKTPKISMEGLHQGQHPKIRMIQMTINS

SEQ ID NO: 127071 - protein, 29 aa, Artificial Sequence
  Cyclic GFR-binding peptide
IGKTPKISMEGILKPKKRVYEMIQVTINS

SEQ ID NO: 127072 - protein, 29 aa, Artificial Sequence
  Cyclic GFR-binding peptide
IGKTPKISMEGLFIPKKRVIEMIQVTINS

SEQ ID NO: 127073 - protein, 29 aa, Artificial Sequence
  Cyclic GFR-binding peptide
IGKTPKIVTAKKFIPKKRVIEIKRVQVPR

SEQ ID NO: 127074 - protein, 29 aa, Artificial Sequence
  Cyclic GFR-binding peptide
IGKTPKISMEGIHQGQHPKIRMIQMTINS

SEQ ID NO: 127075 - protein, 29 aa, Artificial Sequence
  Cyclic GFR-binding peptide
RPVQVRKIEYVRKKPKLKKATVIGKTPKI

SEQ ID NO: 127076 - protein, 29 aa, Artificial Sequence
  Cyclic GFR-binding peptide
RSVKVAKVEYVRKKPKLKEVQVIGKTPKI

SEQ ID NO: 127077 - protein, 29 aa, Artificial Sequence
  Cyclic GFR-binding peptide
RSVKVAKVEIVRKKPIFKEVQVIGKTPKI

SEQ ID NO: 127078 - protein, 29 aa, Artificial Sequence
  Cyclic GFR-binding peptide
RSVKMAKVRIKPHQGQHKEVQVIGKTPKI

SEQ ID NO: 127079 - protein, 29 aa, Artificial Sequence
  Cyclic GFR-binding peptide
RPVQMRKIRIKPHQGQHKKATVIGKTPKI

SEQ ID NO: 127080 - protein, 29 aa, Artificial Sequence
  Cyclic GFR-binding peptide
SNITVQIMEYVRKKPKLLGEMSIGKTPKI

SEQ ID NO: 127081 - protein, 29 aa, Artificial Sequence
  Cyclic GFR-binding peptide
SNITVQIMEIVRKKPIFIGEMSIGKTPKI

SEQ ID NO: 127082 - protein, 29 aa, Artificial Sequence
  Cyclic GFR-binding peptide
SNITMQIMRIKPHQGQHLGEMSIGKTPKI

SEQ ID NO: 127083 - protein, 29 aa, Artificial Sequence
  Cyclic GFR-binding peptide
SNITVQIMEYVRKKPKLIGEMSIGKTPKI

SEQ ID NO: 127084 - protein, 29 aa, Artificial Sequence
  Cyclic GFR-binding peptide
SNITVQIMEIVRKKPIFLGEMSIGKTPKI

SEQ ID NO: 127085 - protein, 29 aa, Artificial Sequence
  Cyclic GFR-binding peptide
RPVQVRKIEIVRKKPIFKKATVIGKTPKI

SEQ ID NO: 127086 - protein, 29 aa, Artificial Sequence
  Cyclic GFR-binding peptide
SNITMQIMRIKPHQGQHIGEMSIGKTPKI

SEQ ID NO: 127087 - protein, 29 aa, Artificial Sequence
  Cyclic GFR-binding peptide
IGKTPKIVTAKKLKPKKRVYEIKRVQVPR

SEQ ID NO: 127088 - protein, 29 aa, Artificial Sequence
  Cyclic GFR-binding peptide
IGKTPKIVQVEKLKPKKRVYEVKAVKVSR

SEQ ID NO: 127089 - protein, 29 aa, Artificial Sequence
  Cyclic GFR-binding peptide
IGKTPKIVQVEKFIPKKRVIEVKAVKVSR

SEQ ID NO: 127090 - protein, 29 aa, Artificial Sequence
  Cyclic GFR-binding peptide
IGKTPKIVQVEKHQGQHPKIRVKAMKVSR

SEQ ID NO: 127091 - protein, 29 aa, Artificial Sequence
  Cyclic GFR-binding peptide
IGKTPKIVTAKKHQGQHPKIRIKRMQVPR

SEQ ID NO: 127092 - protein, 29 aa, Artificial Sequence
  Cyclic GFR-binding peptide
IGKTPKISMEGLLKPKKRVYEMIQVTINS

SEQ ID NO: 127093 - protein, 29 aa, Artificial Sequence
  Cyclic GFR-binding peptide
IGKTPKISMEGIFIPKKRVIEMIQVTINS

SEQ ID NO: 127094 - protein, 29 aa, Artificial Sequence
  Cyclic GFR-binding peptide
IGKTPKISMEGLHQGQHPKIRMIQMTINS

SEQ ID NO: 127095 - protein, 29 aa, Artificial Sequence
  Cyclic GFR-binding peptide
IGKTPKISMEGILKPKKRVYEMIQVTINS

SEQ ID NO: 127096 - protein, 29 aa, Artificial Sequence
  Cyclic GFR-binding peptide
IGKTPKISMEGLFIPKKRVIEMIQVTINS

SEQ ID NO: 127097 - protein, 29 aa, Artificial Sequence
  Cyclic GFR-binding peptide
IGKTPKIVTAKKFIPKKRVIEIKRVQVPR

SEQ ID NO: 127098 - protein, 29 aa, Artificial Sequence
  Cyclic GFR-binding peptide
IGKTPKISMEGIHQGQHPKIRMIQMTINS

SEQ ID NO: 127099 - protein, 29 aa, Artificial Sequence
  Cyclic GFR-binding peptide
RPVQVRKIEYVRKKPKLKKATVIGKTPKI

SEQ ID NO: 127100 - protein, 29 aa, Artificial Sequence
  Cyclic GFR-binding peptide
RSVKVAKVEYVRKKPKLKEVQVIGKTPKI

SEQ ID NO: 127101 - protein, 29 aa, Artificial Sequence
  Cyclic GFR-binding peptide
RSVKVAKVEIVRKKPIFKEVQVIGKTPKI

SEQ ID NO: 127102 - protein, 29 aa, Artificial Sequence
  Cyclic GFR-binding peptide
RSVKMAKVRIKPHQGQHKEVQVIGKTPKI

SEQ ID NO: 127103 - protein, 29 aa, Artificial Sequence
  Cyclic GFR-binding peptide
RPVQMRKIRIKPHQGQHKKATVIGKTPKI

SEQ ID NO: 127104 - protein, 29 aa, Artificial Sequence
  Cyclic GFR-binding peptide
SNITVQIMEYVRKKPKLLGEMSIGKTPKI

SEQ ID NO: 127105 - protein, 29 aa, Artificial Sequence
  Cyclic GFR-binding peptide
SNITVQIMEIVRKKPIFIGEMSIGKTPKI

SEQ ID NO: 127106 - protein, 29 aa, Artificial Sequence
  Cyclic GFR-binding peptide
SNITMQIMRIKPHQGQHLGEMSIGKTPKI

SEQ ID NO: 127107 - protein, 29 aa, Artificial Sequence
  Cyclic GFR-binding peptide
SNITVQIMEYVRKKPKLIGEMSIGKTPKI

SEQ ID NO: 127108 - protein, 29 aa, Artificial Sequence
  Cyclic GFR-binding peptide
SNITVQIMEIVRKKPIFLGEMSIGKTPKI

SEQ ID NO: 127109 - protein, 29 aa, Artificial Sequence
  Cyclic GFR-binding peptide
RPVQVRKIEIVRKKPIFKKATVIGKTPKI

SEQ ID NO: 127110 - protein, 29 aa, Artificial Sequence
  Cyclic GFR-binding peptide
SNITMQIMRIKPHQGQHIGEMSIGKTPKI

SEQ ID NO: 127111 - protein, 27 aa, Artificial Sequence
  Cyclic GFR-binding peptide
IGKTPKIEYQKYVVKENEDIYLMSIPS

SEQ ID NO: 127112 - protein, 27 aa, Artificial Sequence
  Cyclic GFR-binding peptide
IGKTPKIRYKKLIKPTKGIFYLISIAN

SEQ ID NO: 127113 - protein, 27 aa, Artificial Sequence
  Cyclic GFR-binding peptide
IGKTPKIEYKFKVKPTRGVLYLISIPE

SEQ ID NO: 127114 - protein, 27 aa, Artificial Sequence
  Cyclic GFR-binding peptide
IGKTPKIYHYKLVVKDYEDKYLMSIPS

SEQ ID NO: 127115 - protein, 27 aa, Artificial Sequence
  Cyclic GFR-binding peptide
IGKTPKIEYKFKTPVGMDDLYLVSIPE

SEQ ID NO: 127116 - protein, 27 aa, Artificial Sequence
  Cyclic GFR-binding peptide
IGKTPKIEYQKYVKPKRGVIYLISIPS

SEQ ID NO: 127117 - protein, 27 aa, Artificial Sequence
  Cyclic GFR-binding peptide
IGKTPKIRYKKLVVKDYEDFYLMSIAN

SEQ ID NO: 127118 - protein, 27 aa, Artificial Sequence
  Cyclic GFR-binding peptide
IGKTPKIEYQKYVVKDYEDIYLMSIPS

SEQ ID NO: 127119 - protein, 27 aa, Artificial Sequence
  Cyclic GFR-binding peptide
IGKTPKIRYKKLVKPTRGVFYLISIAN

SEQ ID NO: 127120 - protein, 27 aa, Artificial Sequence
  Cyclic GFR-binding peptide
IGKTPKIYHYKLIKPTKGIKYLISIPS

SEQ ID NO: 127121 - protein, 27 aa, Artificial Sequence
  Cyclic GFR-binding peptide
IGKTPKIYHYKLVVKENEDKYLMSIPS

SEQ ID NO: 127122 - protein, 27 aa, Artificial Sequence
  Cyclic GFR-binding peptide
IGKTPKIYHYKLVKPKRGVKYLISIPS

SEQ ID NO: 127123 - protein, 27 aa, Artificial Sequence
  Cyclic GFR-binding peptide
IGKTPKIEYKFKIKPTKGILYLISIPE

SEQ ID NO: 127124 - protein, 27 aa, Artificial Sequence
  Cyclic GFR-binding peptide
IGKTPKIEYQKYIKPTKGIIYLISIPS

SEQ ID NO: 127125 - protein, 27 aa, Artificial Sequence
  Cyclic GFR-binding peptide
IGKTPKIRYKKLVVKENEDFYLMSIAN

SEQ ID NO: 127126 - protein, 27 aa, Artificial Sequence
  Cyclic GFR-binding peptide
IGKTPKIRYKKLVVNNAADFYLISIAN

SEQ ID NO: 127127 - protein, 27 aa, Artificial Sequence
  Cyclic GFR-binding peptide
IGKTPKIYHYKLYTVVGKDKYLISIPS

SEQ ID NO: 127128 - protein, 27 aa, Artificial Sequence
  Cyclic GFR-binding peptide
IGKTPKIRYKKLTPVGMDDFYLVSIAN

SEQ ID NO: 127129 - protein, 27 aa, Artificial Sequence
  Cyclic GFR-binding peptide
IGKTPKIRYKKLVKPKRGVFYLISIAN

SEQ ID NO: 127130 - protein, 27 aa, Artificial Sequence
  Cyclic GFR-binding peptide
IGKTPKIYHYKLVVNNAADKYLISIPS

SEQ ID NO: 127131 - protein, 27 aa, Artificial Sequence
  Cyclic GFR-binding peptide
IGKTPKIYHYKLIVNSSDDKYLVSIPS

SEQ ID NO: 127132 - protein, 27 aa, Artificial Sequence
  Cyclic GFR-binding peptide
IGKTPKIRYKKLIVNNSSDFYLVSIAN

SEQ ID NO: 127133 - protein, 27 aa, Artificial Sequence
  Cyclic GFR-binding peptide
IGKTPKIRYKKLYTVVGKDFYLISIAN

SEQ ID NO: 127134 - protein, 27 aa, Artificial Sequence
  Cyclic GFR-binding peptide
IGKTPKIEYQKYVVNNAADIYLISIPS

SEQ ID NO: 127135 - protein, 27 aa, Artificial Sequence
  Cyclic GFR-binding peptide
IGKTPKIRYKKLIVNSSDDFYLVSIAN

SEQ ID NO: 127136 - protein, 27 aa, Artificial Sequence
  Cyclic GFR-binding peptide
IGKTPKIEYKFKIVNNSSDLYLVSIPE

SEQ ID NO: 127137 - protein, 27 aa, Artificial Sequence
  Cyclic GFR-binding peptide
IGKTPKIEYQKYVKPTRGVIYLISIPS

SEQ ID NO: 127138 - protein, 27 aa, Artificial Sequence
  Cyclic GFR-binding peptide
IGKTPKIEYQKYIVNSSDDIYLVSIPS

SEQ ID NO: 127139 - protein, 27 aa, Artificial Sequence
  Cyclic GFR-binding peptide
IGKTPKIYHYKLTPVGMDDKYLVSIPS

SEQ ID NO: 127140 - protein, 27 aa, Artificial Sequence
  Cyclic GFR-binding peptide
IGKTPKIYHYKLIVNNSSDKYLVSIPS

SEQ ID NO: 127141 - protein, 27 aa, Artificial Sequence
  Cyclic GFR-binding peptide
IGKTPKIEYKFKIVNSSDDLYLVSIPE

SEQ ID NO: 127142 - protein, 27 aa, Artificial Sequence
  Cyclic GFR-binding peptide
IGKTPKIYHYKLVKPTRGVKYLISIPS

SEQ ID NO: 127143 - protein, 27 aa, Artificial Sequence
  Cyclic GFR-binding peptide
IGKTPKIEYKFKVKPKRGVLYLISIPE

SEQ ID NO: 127144 - protein, 27 aa, Artificial Sequence
  Cyclic GFR-binding peptide
IGKTPKIEYQKYYTVVGKDIYLISIPS

SEQ ID NO: 127145 - protein, 27 aa, Artificial Sequence
  Cyclic GFR-binding peptide
IGKTPKIEYKFKVVKENEDLYLMSIPE

SEQ ID NO: 127146 - protein, 27 aa, Artificial Sequence
  Cyclic GFR-binding peptide
IGKTPKIEYQKYTPVGMDDIYLVSIPS

SEQ ID NO: 127147 - protein, 27 aa, Artificial Sequence
  Cyclic GFR-binding peptide
IGKTPKIEYQKYIVNNSSDIYLVSIPS

SEQ ID NO: 127148 - protein, 27 aa, Artificial Sequence
  Cyclic GFR-binding peptide
IGKTPKIEYKFKVVKDYEDLYLMSIPE

SEQ ID NO: 127149 - protein, 27 aa, Artificial Sequence
  Cyclic GFR-binding peptide
IGKTPKIEYKFKYTVVGKDLYLISIPE

SEQ ID NO: 127150 - protein, 27 aa, Artificial Sequence
  Cyclic GFR-binding peptide
IGKTPKIEYKFKVVNNAADLYLISIPE

SEQ ID NO: 127151 - protein, 27 aa, Artificial Sequence
  Cyclic GFR-binding peptide
SPISMLYIDENEKVVYKQYEIGKTPKI

SEQ ID NO: 127152 - protein, 27 aa, Artificial Sequence
  Cyclic GFR-binding peptide
NAISILYFIGKTPKILKKYRIGKTPKI

SEQ ID NO: 127153 - protein, 27 aa, Artificial Sequence
  Cyclic GFR-binding peptide
EPISILYLVGRTPKVKFKYEIGKTPKI

SEQ ID NO: 127154 - protein, 27 aa, Artificial Sequence
  Cyclic GFR-binding peptide
SPISMLYKDEYDKVVLKYHYIGKTPKI

SEQ ID NO: 127155 - protein, 27 aa, Artificial Sequence
  Cyclic GFR-binding peptide
EPISVLYLDDMGVPTKFKYEIGKTPKI

SEQ ID NO: 127156 - protein, 27 aa, Artificial Sequence
  Cyclic GFR-binding peptide
SPISILYIVGRKPKVYKQYEIGKTPKI

SEQ ID NO: 127157 - protein, 27 aa, Artificial Sequence
  Cyclic GFR-binding peptide
NAISMLYFDEYDKVVLKKYRIGKTPKI

SEQ ID NO: 127158 - protein, 27 aa, Artificial Sequence
  Cyclic GFR-binding peptide
SPISMLYIDEYDKVVYKQYEIGKTPKI

SEQ ID NO: 127159 - protein, 27 aa, Artificial Sequence
  Cyclic GFR-binding peptide
NAISILYFVGRTPKVLKKYRIGKTPKI

SEQ ID NO: 127160 - protein, 27 aa, Artificial Sequence
  Cyclic GFR-binding peptide
SPISILYKIGKTPKILKYHYIGKTPKI

SEQ ID NO: 127161 - protein, 27 aa, Artificial Sequence
  Cyclic GFR-binding peptide
SPISMLYKDENEKVVLKYHYIGKTPKI

SEQ ID NO: 127162 - protein, 27 aa, Artificial Sequence
  Cyclic GFR-binding peptide
SPISILYKVGRKPKVLKYHYIGKTPKI

SEQ ID NO: 127163 - protein, 27 aa, Artificial Sequence
  Cyclic GFR-binding peptide
EPISILYLIGKTPKIKFKYEIGKTPKI

SEQ ID NO: 127164 - protein, 27 aa, Artificial Sequence
  Cyclic GFR-binding peptide
SPISILYIIGKTPKIYKQYEIGKTPKI

SEQ ID NO: 127165 - protein, 27 aa, Artificial Sequence
  Cyclic GFR-binding peptide
NAISMLYFDENEKVVLKKYRIGKTPKI

SEQ ID NO: 127166 - protein, 27 aa, Artificial Sequence
  Cyclic GFR-binding peptide
NAISILYFDAANNVVLKKYRIGKTPKI

SEQ ID NO: 127167 - protein, 27 aa, Artificial Sequence
  Cyclic GFR-binding peptide
SPISILYKDKGVVTYLKYHYIGKTPKI

SEQ ID NO: 127168 - protein, 27 aa, Artificial Sequence
  Cyclic GFR-binding peptide
NAISVLYFDDMGVPTLKKYRIGKTPKI

SEQ ID NO: 127169 - protein, 27 aa, Artificial Sequence
  Cyclic GFR-binding peptide
NAISILYFVGRKPKVLKKYRIGKTPKI

SEQ ID NO: 127170 - protein, 27 aa, Artificial Sequence
  Cyclic GFR-binding peptide
SPISILYKDAANNVVLKYHYIGKTPKI

SEQ ID NO: 127171 - protein, 27 aa, Artificial Sequence
  Cyclic GFR-binding peptide
SPISVLYKDDSSNVILKYHYIGKTPKI

SEQ ID NO: 127172 - protein, 27 aa, Artificial Sequence
  Cyclic GFR-binding peptide
NAISVLYFDSSNNVILKKYRIGKTPKI

SEQ ID NO: 127173 - protein, 27 aa, Artificial Sequence
  Cyclic GFR-binding peptide
NAISILYFDKGVVTYLKKYRIGKTPKI

SEQ ID NO: 127174 - protein, 27 aa, Artificial Sequence
  Cyclic GFR-binding peptide
SPISILYIDAANNVVYKQYEIGKTPKI

SEQ ID NO: 127175 - protein, 27 aa, Artificial Sequence
  Cyclic GFR-binding peptide
NAISVLYFDDSSNVILKKYRIGKTPKI

SEQ ID NO: 127176 - protein, 27 aa, Artificial Sequence
  Cyclic GFR-binding peptide
EPISVLYLDSSNNVIKFKYEIGKTPKI

SEQ ID NO: 127177 - protein, 27 aa, Artificial Sequence
  Cyclic GFR-binding peptide
SPISILYIVGRTPKVYKQYEIGKTPKI

SEQ ID NO: 127178 - protein, 27 aa, Artificial Sequence
  Cyclic GFR-binding peptide
SPISVLYIDDSSNVIYKQYEIGKTPKI

SEQ ID NO: 127179 - protein, 27 aa, Artificial Sequence
  Cyclic GFR-binding peptide
SPISVLYKDDMGVPTLKYHYIGKTPKI

SEQ ID NO: 127180 - protein, 27 aa, Artificial Sequence
  Cyclic GFR-binding peptide
SPISVLYKDSSNNVILKYHYIGKTPKI

SEQ ID NO: 127181 - protein, 27 aa, Artificial Sequence
  Cyclic GFR-binding peptide
EPISVLYLDDSSNVIKFKYEIGKTPKI

SEQ ID NO: 127182 - protein, 27 aa, Artificial Sequence
  Cyclic GFR-binding peptide
SPISILYKVGRTPKVLKYHYIGKTPKI

SEQ ID NO: 127183 - protein, 27 aa, Artificial Sequence
  Cyclic GFR-binding peptide
EPISILYLVGRKPKVKFKYEIGKTPKI

SEQ ID NO: 127184 - protein, 27 aa, Artificial Sequence
  Cyclic GFR-binding peptide
SPISILYIDKGVVTYYKQYEIGKTPKI

SEQ ID NO: 127185 - protein, 27 aa, Artificial Sequence
  Cyclic GFR-binding peptide
EPISMLYLDENEKVVKFKYEIGKTPKI

SEQ ID NO: 127186 - protein, 27 aa, Artificial Sequence
  Cyclic GFR-binding peptide
SPISVLYIDDMGVPTYKQYEIGKTPKI

SEQ ID NO: 127187 - protein, 27 aa, Artificial Sequence
  Cyclic GFR-binding peptide
SPISVLYIDSSNNVIYKQYEIGKTPKI

SEQ ID NO: 127188 - protein, 27 aa, Artificial Sequence
  Cyclic GFR-binding peptide
EPISMLYLDEYDKVVKFKYEIGKTPKI

SEQ ID NO: 127189 - protein, 27 aa, Artificial Sequence
  Cyclic GFR-binding peptide
EPISILYLDKGVVTYKFKYEIGKTPKI

SEQ ID NO: 127190 - protein, 27 aa, Artificial Sequence
  Cyclic GFR-binding peptide
EPISILYLDAANNVVKFKYEIGKTPKI

SEQ ID NO: 127191 - protein, 27 aa, Artificial Sequence
  Cyclic GFR-binding peptide
IGKTPKIPIKGYIIQQKDNFYLMNIPS

SEQ ID NO: 127192 - protein, 27 aa, Artificial Sequence
  Cyclic GFR-binding peptide
IGKTPKIPIKGYVVKDYEDFYLMNIPS

SEQ ID NO: 127193 - protein, 27 aa, Artificial Sequence
  Cyclic GFR-binding peptide
IGKTPKIPIKGYIVNSSDDFYLVNIPS

SEQ ID NO: 127194 - protein, 27 aa, Artificial Sequence
  Cyclic GFR-binding peptide
IGKTPKIPIKGYLLVRGNDFYLMNIPS

SEQ ID NO: 127195 - protein, 27 aa, Artificial Sequence
  Cyclic GFR-binding peptide
IGKTPKIPIKGYVVNNAADFYLINIPS

SEQ ID NO: 127196 - protein, 27 aa, Artificial Sequence
  Cyclic GFR-binding peptide
IGKTPKIPIKGYVVKENEDFYLMNIPS

SEQ ID NO: 127197 - protein, 27 aa, Artificial Sequence
  Cyclic GFR-binding peptide
IGKTPKIPIKGYVVNNASDFYLINIPS

SEQ ID NO: 127198 - protein, 27 aa, Artificial Sequence
  Cyclic GFR-binding peptide
IGKTPKIPIKGYYTVVGKDFYLINIPS

SEQ ID NO: 127199 - protein, 27 aa, Artificial Sequence
  Cyclic GFR-binding peptide
IGKTPKIPIKGYTPVGMDDFYLVNIPS

SEQ ID NO: 127200 - protein, 27 aa, Artificial Sequence
  Cyclic GFR-binding peptide
IGKTPKIPIKGYIVNNSSDFYLVNIPS

SEQ ID NO: 127201 - protein, 27 aa, Artificial Sequence
  Cyclic GFR-binding peptide
SPINMLYFNDKQQIIYGKIPIGKTPKI

SEQ ID NO: 127202 - protein, 27 aa, Artificial Sequence
  Cyclic GFR-binding peptide
SPINMLYFDEYDKVVYGKIPIGKTPKI

SEQ ID NO: 127203 - protein, 27 aa, Artificial Sequence
  Cyclic GFR-binding peptide
SPINVLYFDDSSNVIYGKIPIGKTPKI

SEQ ID NO: 127204 - protein, 27 aa, Artificial Sequence
  Cyclic GFR-binding peptide
SPINMLYFDNGRVLLYGKIPIGKTPKI

SEQ ID NO: 127205 - protein, 27 aa, Artificial Sequence
  Cyclic GFR-binding peptide
SPINILYFDAANNVVYGKIPIGKTPKI

SEQ ID NO: 127206 - protein, 27 aa, Artificial Sequence
  Cyclic GFR-binding peptide
SPINMLYFDENEKVVYGKIPIGKTPKI

SEQ ID NO: 127207 - protein, 27 aa, Artificial Sequence
  Cyclic GFR-binding peptide
SPINILYFDSANNVVYGKIPIGKTPKI

SEQ ID NO: 127208 - protein, 27 aa, Artificial Sequence
  Cyclic GFR-binding peptide
SPINILYFDKGVVTYYGKIPIGKTPKI

SEQ ID NO: 127209 - protein, 27 aa, Artificial Sequence
  Cyclic GFR-binding peptide
SPINVLYFDDMGVPTYGKIPIGKTPKI

SEQ ID NO: 127210 - protein, 27 aa, Artificial Sequence
  Cyclic GFR-binding peptide
SPINVLYFDSSNNVIYGKIPIGKTPKI

SEQ ID NO: 127211 - protein, 27 aa, Artificial Sequence
  Cyclic GFR-binding peptide
IGKTPKIPIKGYIIQQKDNFYLMNIPS

SEQ ID NO: 127212 - protein, 27 aa, Artificial Sequence
  Cyclic GFR-binding peptide
IGKTPKIPIKGYVVKDYEDFYLMNIPS

SEQ ID NO: 127213 - protein, 27 aa, Artificial Sequence
  Cyclic GFR-binding peptide
IGKTPKIPIKGYIVNSSDDFYLVNIPS

SEQ ID NO: 127214 - protein, 27 aa, Artificial Sequence
  Cyclic GFR-binding peptide
IGKTPKIPIKGYLLVRGNDFYLMNIPS

SEQ ID NO: 127215 - protein, 27 aa, Artificial Sequence
  Cyclic GFR-binding peptide
IGKTPKIPIKGYVVNNAADFYLINIPS

SEQ ID NO: 127216 - protein, 27 aa, Artificial Sequence
  Cyclic GFR-binding peptide
IGKTPKIPIKGYVVKENEDFYLMNIPS

SEQ ID NO: 127217 - protein, 27 aa, Artificial Sequence
  Cyclic GFR-binding peptide
IGKTPKIPIKGYVVNNASDFYLINIPS

SEQ ID NO: 127218 - protein, 27 aa, Artificial Sequence
  Cyclic GFR-binding peptide
IGKTPKIPIKGYYTVVGKDFYLINIPS

SEQ ID NO: 127219 - protein, 27 aa, Artificial Sequence
  Cyclic GFR-binding peptide
IGKTPKIPIKGYTPVGMDDFYLVNIPS

SEQ ID NO: 127220 - protein, 27 aa, Artificial Sequence
  Cyclic GFR-binding peptide
IGKTPKIPIKGYIVNNSSDFYLVNIPS

SEQ ID NO: 127221 - protein, 27 aa, Artificial Sequence
  Cyclic GFR-binding peptide
SPINMLYFNDKQQIIYGKIPIGKTPKI

SEQ ID NO: 127222 - protein, 27 aa, Artificial Sequence
  Cyclic GFR-binding peptide
SPINMLYFDEYDKVVYGKIPIGKTPKI

SEQ ID NO: 127223 - protein, 27 aa, Artificial Sequence
  Cyclic GFR-binding peptide
SPINVLYFDDSSNVIYGKIPIGKTPKI

SEQ ID NO: 127224 - protein, 27 aa, Artificial Sequence
  Cyclic GFR-binding peptide
SPINMLYFDNGRVLLYGKIPIGKTPKI

SEQ ID NO: 127225 - protein, 27 aa, Artificial Sequence
  Cyclic GFR-binding peptide
SPINILYFDAANNVVYGKIPIGKTPKI

SEQ ID NO: 127226 - protein, 27 aa, Artificial Sequence
  Cyclic GFR-binding peptide
SPINMLYFDENEKVVYGKIPIGKTPKI

SEQ ID NO: 127227 - protein, 27 aa, Artificial Sequence
  Cyclic GFR-binding peptide
SPINILYFDSANNVVYGKIPIGKTPKI

SEQ ID NO: 127228 - protein, 27 aa, Artificial Sequence
  Cyclic GFR-binding peptide
SPINILYFDKGVVTYYGKIPIGKTPKI

SEQ ID NO: 127229 - protein, 27 aa, Artificial Sequence
  Cyclic GFR-binding peptide
SPINVLYFDDMGVPTYGKIPIGKTPKI

SEQ ID NO: 127230 - protein, 27 aa, Artificial Sequence
  Cyclic GFR-binding peptide
SPINVLYFDSSNNVIYGKIPIGKTPKI

SEQ ID NO: 127231 - protein, 27 aa, Artificial Sequence
  Cyclic GFR-binding peptide
IGKTPKIRYKKLIKPTKGIFYLISIAN

SEQ ID NO: 127232 - protein, 27 aa, Artificial Sequence
  Cyclic GFR-binding peptide
IGKTPKIRYKKLVVKDYEDFYLMSIAN

SEQ ID NO: 127233 - protein, 27 aa, Artificial Sequence
  Cyclic GFR-binding peptide
IGKTPKIRYKKLVKPTRGVFYLISIAN

SEQ ID NO: 127234 - protein, 27 aa, Artificial Sequence
  Cyclic GFR-binding peptide
IGKTPKIRYKKLVVKENEDFYLMSIAN

SEQ ID NO: 127235 - protein, 27 aa, Artificial Sequence
  Cyclic GFR-binding peptide
IGKTPKIRYKKLVKPKRGVFYLISIAN

SEQ ID NO: 127236 - protein, 27 aa, Artificial Sequence
  Cyclic GFR-binding peptide
IGKTPKIRYKKLIVNSSDDFYLVSIAN

SEQ ID NO: 127237 - protein, 27 aa, Artificial Sequence
  Cyclic GFR-binding peptide
IGKTPKIRYKKLVVNNASDFYLISIAN

SEQ ID NO: 127238 - protein, 27 aa, Artificial Sequence
  Cyclic GFR-binding peptide
NAISILYFIGKTPKILKKYRIGKTPKI

SEQ ID NO: 127239 - protein, 27 aa, Artificial Sequence
  Cyclic GFR-binding peptide
NAISMLYFDEYDKVVLKKYRIGKTPKI

SEQ ID NO: 127240 - protein, 27 aa, Artificial Sequence
  Cyclic GFR-binding peptide
NAISILYFVGRTPKVLKKYRIGKTPKI

SEQ ID NO: 127241 - protein, 27 aa, Artificial Sequence
  Cyclic GFR-binding peptide
NAISMLYFDENEKVVLKKYRIGKTPKI

SEQ ID NO: 127242 - protein, 27 aa, Artificial Sequence
  Cyclic GFR-binding peptide
NAISILYFVGRKPKVLKKYRIGKTPKI

SEQ ID NO: 127243 - protein, 27 aa, Artificial Sequence
  Cyclic GFR-binding peptide
NAISVLYFDDSSNVILKKYRIGKTPKI

SEQ ID NO: 127244 - protein, 27 aa, Artificial Sequence
  Cyclic GFR-binding peptide
NAISILYFDSANNVVLKKYRIGKTPKI

SEQ ID NO: 127245 - protein, 27 aa, Artificial Sequence
  Cyclic GFR-binding peptide
IGKTPKIEYQKYVVKENEDIYLMSIPS

SEQ ID NO: 127246 - protein, 27 aa, Artificial Sequence
  Cyclic GFR-binding peptide
IGKTPKINSLQEVVKDYEDYYLMTLPE

SEQ ID NO: 127247 - protein, 27 aa, Artificial Sequence
  Cyclic GFR-binding peptide
IGKTPKIEYQKYVVKENEDIFLMSIPS

SEQ ID NO: 127248 - protein, 27 aa, Artificial Sequence
  Cyclic GFR-binding peptide
IGKTPKINSLQEIKPTKGIYYVIPLPE

SEQ ID NO: 127249 - protein, 27 aa, Artificial Sequence
  Cyclic GFR-binding peptide
IGKTPKINSLQEVKPKRGVYYLITLPE

SEQ ID NO: 127250 - protein, 27 aa, Artificial Sequence
  Cyclic GFR-binding peptide
IGKTPKIEYQKYVVNNAADIYLISIPS

SEQ ID NO: 127251 - protein, 27 aa, Artificial Sequence
  Cyclic GFR-binding peptide
IGKTPKINSLQEVKPTRGVYYVIPLPE

SEQ ID NO: 127252 - protein, 27 aa, Artificial Sequence
  Cyclic GFR-binding peptide
IGKTPKIEYQKYIVNSSDDIFLVSIPS

SEQ ID NO: 127253 - protein, 27 aa, Artificial Sequence
  Cyclic GFR-binding peptide
IGKTPKIEYQKYVKPTRGVIFLISIPS

SEQ ID NO: 127254 - protein, 27 aa, Artificial Sequence
  Cyclic GFR-binding peptide
IGKTPKIEYQKYVVKDYEDIYLMSIPS

SEQ ID NO: 127255 - protein, 27 aa, Artificial Sequence
  Cyclic GFR-binding peptide
IGKTPKINSLQEVVKENEDYYLMTLPE

SEQ ID NO: 127256 - protein, 27 aa, Artificial Sequence
  Cyclic GFR-binding peptide
IGKTPKINSLQEVVNNASDYYLITLPE

SEQ ID NO: 127257 - protein, 27 aa, Artificial Sequence
  Cyclic GFR-binding peptide
IGKTPKINSLQEVKPKRGVYYVIPLPE

SEQ ID NO: 127258 - protein, 27 aa, Artificial Sequence
  Cyclic GFR-binding peptide
IGKTPKIEYQKYIVNSSDDIYLVSIPS

SEQ ID NO: 127259 - protein, 27 aa, Artificial Sequence
  Cyclic GFR-binding peptide
IGKTPKINSLQEVVKENEDYYVMPLPE

SEQ ID NO: 127260 - protein, 27 aa, Artificial Sequence
  Cyclic GFR-binding peptide
IGKTPKIEYQKYVVKDYEDIFLMSIPS

SEQ ID NO: 127261 - protein, 27 aa, Artificial Sequence
  Cyclic GFR-binding peptide
IGKTPKINSLQEVVNNASDYYVIPLPE

SEQ ID NO: 127262 - protein, 27 aa, Artificial Sequence
  Cyclic GFR-binding peptide
IGKTPKIEYQKYVVNNASDIYLISIPS

SEQ ID NO: 127263 - protein, 27 aa, Artificial Sequence
  Cyclic GFR-binding peptide
IGKTPKINSLQEVKPTRGVYYLITLPE

SEQ ID NO: 127264 - protein, 27 aa, Artificial Sequence
  Cyclic GFR-binding peptide
IGKTPKIEYQKYYTVVGKDIYLISIPS

SEQ ID NO: 127265 - protein, 27 aa, Artificial Sequence
  Cyclic GFR-binding peptide
IGKTPKIEYQKYIIQQKDNIYLMSIPS

SEQ ID NO: 127266 - protein, 27 aa, Artificial Sequence
  Cyclic GFR-binding peptide
IGKTPKIEYQKYTPVGMDDIYLVSIPS

SEQ ID NO: 127267 - protein, 27 aa, Artificial Sequence
  Cyclic GFR-binding peptide
IGKTPKIEYQKYIKPTKGIIFLISIPS

SEQ ID NO: 127268 - protein, 27 aa, Artificial Sequence
  Cyclic GFR-binding peptide
IGKTPKIEYQKYIVNNSSDIYLVSIPS

SEQ ID NO: 127269 - protein, 27 aa, Artificial Sequence
  Cyclic GFR-binding peptide
IGKTPKINSLQEIKPTKGIYYLITLPE

SEQ ID NO: 127270 - protein, 27 aa, Artificial Sequence
  Cyclic GFR-binding peptide
IGKTPKIEYQKYVVNNASDIFLISIPS

SEQ ID NO: 127271 - protein, 27 aa, Artificial Sequence
  Cyclic GFR-binding peptide
IGKTPKIEYQKYVKPKRGVIFLISIPS

SEQ ID NO: 127272 - protein, 27 aa, Artificial Sequence
  Cyclic GFR-binding peptide
IGKTPKINSLQEIVNSSDDYYVVPLPE

SEQ ID NO: 127273 - protein, 27 aa, Artificial Sequence
  Cyclic GFR-binding peptide
IGKTPKINSLQEVVKDYEDYYVMPLPE

SEQ ID NO: 127274 - protein, 27 aa, Artificial Sequence
  Cyclic GFR-binding peptide
IGKTPKIEYQKYLLVRGNDIYLMSIPS

SEQ ID NO: 127275 - protein, 27 aa, Artificial Sequence
  Cyclic GFR-binding peptide
IGKTPKINSLQEIVNSSDDYYLVTLPE

SEQ ID NO: 127276 - protein, 27 aa, Artificial Sequence
  Cyclic GFR-binding peptide
SPISMLYIDENEKVVYKQYEIGKTPKI

SEQ ID NO: 127277 - protein, 27 aa, Artificial Sequence
  Cyclic GFR-binding peptide
EPLTMLYYDEYDKVVEQLSNIGKTPKI

SEQ ID NO: 127278 - protein, 27 aa, Artificial Sequence
  Cyclic GFR-binding peptide
SPISMLFIDENEKVVYKQYEIGKTPKI

SEQ ID NO: 127279 - protein, 27 aa, Artificial Sequence
  Cyclic GFR-binding peptide
EPLPIVYYIGKTPKIEQLSNIGKTPKI

SEQ ID NO: 127280 - protein, 27 aa, Artificial Sequence
  Cyclic GFR-binding peptide
EPLTILYYVGRKPKVEQLSNIGKTPKI

SEQ ID NO: 127281 - protein, 27 aa, Artificial Sequence
  Cyclic GFR-binding peptide
SPISILYIDAANNVVYKQYEIGKTPKI

SEQ ID NO: 127282 - protein, 27 aa, Artificial Sequence
  Cyclic GFR-binding peptide
EPLPIVYYVGRTPKVEQLSNIGKTPKI

SEQ ID NO: 127283 - protein, 27 aa, Artificial Sequence
  Cyclic GFR-binding peptide
SPISVLFIDDSSNVIYKQYEIGKTPKI

SEQ ID NO: 127284 - protein, 27 aa, Artificial Sequence
  Cyclic GFR-binding peptide
SPISILFIVGRTPKVYKQYEIGKTPKI

SEQ ID NO: 127285 - protein, 27 aa, Artificial Sequence
  Cyclic GFR-binding peptide
SPISMLYIDEYDKVVYKQYEIGKTPKI

SEQ ID NO: 127286 - protein, 27 aa, Artificial Sequence
  Cyclic GFR-binding peptide
EPLTMLYYDENEKVVEQLSNIGKTPKI

SEQ ID NO: 127287 - protein, 27 aa, Artificial Sequence
  Cyclic GFR-binding peptide
EPLTILYYDSANNVVEQLSNIGKTPKI

SEQ ID NO: 127288 - protein, 27 aa, Artificial Sequence
  Cyclic GFR-binding peptide
EPLPIVYYVGRKPKVEQLSNIGKTPKI

SEQ ID NO: 127289 - protein, 27 aa, Artificial Sequence
  Cyclic GFR-binding peptide
SPISVLYIDDSSNVIYKQYEIGKTPKI

SEQ ID NO: 127290 - protein, 27 aa, Artificial Sequence
  Cyclic GFR-binding peptide
EPLPMVYYDENEKVVEQLSNIGKTPKI

SEQ ID NO: 127291 - protein, 27 aa, Artificial Sequence
  Cyclic GFR-binding peptide
SPISMLFIDEYDKVVYKQYEIGKTPKI

SEQ ID NO: 127292 - protein, 27 aa, Artificial Sequence
  Cyclic GFR-binding peptide
EPLPIVYYDSANNVVEQLSNIGKTPKI

SEQ ID NO: 127293 - protein, 27 aa, Artificial Sequence
  Cyclic GFR-binding peptide
SPISILYIDSANNVVYKQYEIGKTPKI

SEQ ID NO: 127294 - protein, 27 aa, Artificial Sequence
  Cyclic GFR-binding peptide
EPLTILYYVGRTPKVEQLSNIGKTPKI

SEQ ID NO: 127295 - protein, 27 aa, Artificial Sequence
  Cyclic GFR-binding peptide
SPISILYIDKGVVTYYKQYEIGKTPKI

SEQ ID NO: 127296 - protein, 27 aa, Artificial Sequence
  Cyclic GFR-binding peptide
SPISMLYINDKQQIIYKQYEIGKTPKI

SEQ ID NO: 127297 - protein, 27 aa, Artificial Sequence
  Cyclic GFR-binding peptide
SPISVLYIDDMGVPTYKQYEIGKTPKI

SEQ ID NO: 127298 - protein, 27 aa, Artificial Sequence
  Cyclic GFR-binding peptide
SPISILFIIGKTPKIYKQYEIGKTPKI

SEQ ID NO: 127299 - protein, 27 aa, Artificial Sequence
  Cyclic GFR-binding peptide
SPISVLYIDSSNNVIYKQYEIGKTPKI

SEQ ID NO: 127300 - protein, 27 aa, Artificial Sequence
  Cyclic GFR-binding peptide
EPLTILYYIGKTPKIEQLSNIGKTPKI

SEQ ID NO: 127301 - protein, 27 aa, Artificial Sequence
  Cyclic GFR-binding peptide
SPISILFIDSANNVVYKQYEIGKTPKI

SEQ ID NO: 127302 - protein, 27 aa, Artificial Sequence
  Cyclic GFR-binding peptide
SPISILFIVGRKPKVYKQYEIGKTPKI

SEQ ID NO: 127303 - protein, 27 aa, Artificial Sequence
  Cyclic GFR-binding peptide
EPLPVVYYDDSSNVIEQLSNIGKTPKI

SEQ ID NO: 127304 - protein, 27 aa, Artificial Sequence
  Cyclic GFR-binding peptide
EPLPMVYYDEYDKVVEQLSNIGKTPKI

SEQ ID NO: 127305 - protein, 27 aa, Artificial Sequence
  Cyclic GFR-binding peptide
SPISMLYIDNGRVLLYKQYEIGKTPKI

SEQ ID NO: 127306 - protein, 27 aa, Artificial Sequence
  Cyclic GFR-binding peptide
EPLTVLYYDDSSNVIEQLSNIGKTPKI

SEQ ID NO: 127307 - protein, 27 aa, Artificial Sequence
  Cyclic GFR-binding peptide
IGKTPKIPYVKLVVKENEDFFLMSLSS

SEQ ID NO: 127308 - protein, 29 aa, Artificial Sequence
  Cyclic GFR-binding peptide
IGKTPKIPYVKLHQGQHPKIRFFLMSLSS

SEQ ID NO: 127309 - protein, 27 aa, Artificial Sequence
  Cyclic GFR-binding peptide
IGKTPKIPYVKLVVNKNEDFFLISLSS

SEQ ID NO: 127310 - protein, 27 aa, Artificial Sequence
  Cyclic GFR-binding peptide
IGKTPKIPYVKLVKPKRGVLFFISLSS

SEQ ID NO: 127311 - protein, 27 aa, Artificial Sequence
  Cyclic GFR-binding peptide
IGKTPKIPYVKLVVNNAADFFLISLSS

SEQ ID NO: 127312 - protein, 27 aa, Artificial Sequence
  Cyclic GFR-binding peptide
IGKTPKIPYVKLIVNNSSDFFLVSLSS

SEQ ID NO: 127313 - protein, 27 aa, Artificial Sequence
  Cyclic GFR-binding peptide
IGKTPKIPYVKLIIQQKDNFFLMSLSS

SEQ ID NO: 127314 - protein, 27 aa, Artificial Sequence
  Cyclic GFR-binding peptide
IGKTPKIPYVKLLLVRGNDFFLMSLSS

SEQ ID NO: 127315 - protein, 27 aa, Artificial Sequence
  Cyclic GFR-binding peptide
IGKTPKIPYVKLVKPTRGVLFFISLSS

SEQ ID NO: 127316 - protein, 27 aa, Artificial Sequence
  Cyclic GFR-binding peptide
IGKTPKIPYVKLVVNNASDFFLISLSS

SEQ ID NO: 127317 - protein, 27 aa, Artificial Sequence
  Cyclic GFR-binding peptide
IGKTPKIPYVKLIKPTKGILFFISLSS

SEQ ID NO: 127318 - protein, 27 aa, Artificial Sequence
  Cyclic GFR-binding peptide
IGKTPKIPYVKLTPVGMDDFFLVSLSS

SEQ ID NO: 127319 - protein, 27 aa, Artificial Sequence
  Cyclic GFR-binding peptide
IGKTPKIPYVKLYTVVGKDFFLISLSS

SEQ ID NO: 127320 - protein, 27 aa, Artificial Sequence
  Cyclic GFR-binding peptide
IGKTPKIPYVKLVVKDYEDFFLMSLSS

SEQ ID NO: 127321 - protein, 27 aa, Artificial Sequence
  Cyclic GFR-binding peptide
IGKTPKIPYVKLIVNSSDDFFLVSLSS

SEQ ID NO: 127322 - protein, 29 aa, Artificial Sequence
  Cyclic GFR-binding peptide
IGKTPKIPYVKLLKPKKRVYEFFLVSLSS

SEQ ID NO: 127323 - protein, 27 aa, Artificial Sequence
  Cyclic GFR-binding peptide
SSLSMLFFDENEKVVLKVYPIGKTPKI

SEQ ID NO: 127324 - protein, 29 aa, Artificial Sequence
  Cyclic GFR-binding peptide
SSLSMLFFRIKPHQGQHLKVYPIGKTPKI

SEQ ID NO: 127325 - protein, 27 aa, Artificial Sequence
  Cyclic GFR-binding peptide
SSLSILFFDENKNVVLKVYPIGKTPKI

SEQ ID NO: 127326 - protein, 27 aa, Artificial Sequence
  Cyclic GFR-binding peptide
SSLSILFFVGRKPKVLKVYPIGKTPKI

SEQ ID NO: 127327 - protein, 27 aa, Artificial Sequence
  Cyclic GFR-binding peptide
SSLSILFFDAANNVVLKVYPIGKTPKI

SEQ ID NO: 127328 - protein, 27 aa, Artificial Sequence
  Cyclic GFR-binding peptide
SSLSVLFFDSSNNVILKVYPIGKTPKI

SEQ ID NO: 127329 - protein, 27 aa, Artificial Sequence
  Cyclic GFR-binding peptide
SSLSMLFFNDKQQIILKVYPIGKTPKI

SEQ ID NO: 127330 - protein, 27 aa, Artificial Sequence
  Cyclic GFR-binding peptide
SSLSMLFFDNGRVLLLKVYPIGKTPKI

SEQ ID NO: 127331 - protein, 27 aa, Artificial Sequence
  Cyclic GFR-binding peptide
SSLSILFFVGRTPKVLKVYPIGKTPKI

SEQ ID NO: 127332 - protein, 27 aa, Artificial Sequence
  Cyclic GFR-binding peptide
SSLSILFFDSANNVVLKVYPIGKTPKI

SEQ ID NO: 127333 - protein, 27 aa, Artificial Sequence
  Cyclic GFR-binding peptide
SSLSILFFIGKTPKILKVYPIGKTPKI

SEQ ID NO: 127334 - protein, 27 aa, Artificial Sequence
  Cyclic GFR-binding peptide
SSLSVLFFDDMGVPTLKVYPIGKTPKI

SEQ ID NO: 127335 - protein, 27 aa, Artificial Sequence
  Cyclic GFR-binding peptide
SSLSILFFDKGVVTYLKVYPIGKTPKI

SEQ ID NO: 127336 - protein, 27 aa, Artificial Sequence
  Cyclic GFR-binding peptide
SSLSMLFFDEYDKVVLKVYPIGKTPKI

SEQ ID NO: 127337 - protein, 27 aa, Artificial Sequence
  Cyclic GFR-binding peptide
SSLSVLFFDDSSNVILKVYPIGKTPKI

SEQ ID NO: 127338 - protein, 29 aa, Artificial Sequence
  Cyclic GFR-binding peptide
SSLSVLFFEYVRKKPKLLKVYPIGKTPKI

SEQ ID NO: 127339 - protein, 27 aa, Artificial Sequence
  Cyclic GFR-binding peptide
IGKTPKINSLQEVVKDYEDYYLMTLPE

SEQ ID NO: 127340 - protein, 27 aa, Artificial Sequence
  Cyclic GFR-binding peptide
IGKTPKINSLQEIKPTKGIYYVIPLPE

SEQ ID NO: 127341 - protein, 27 aa, Artificial Sequence
  Cyclic GFR-binding peptide
IGKTPKISMEGIIVNSSDDMIQVTINS

SEQ ID NO: 127342 - protein, 27 aa, Artificial Sequence
  Cyclic GFR-binding peptide
IGKTPKINSLQEVKPKRGVYYLITLPE

SEQ ID NO: 127343 - protein, 27 aa, Artificial Sequence
  Cyclic GFR-binding peptide
IGKTPKINSLQEVKPTRGVYYVIPLPE

SEQ ID NO: 127344 - protein, 27 aa, Artificial Sequence
  Cyclic GFR-binding peptide
IGKTPKIVTAKKVVKENEDIKRMQVPR

SEQ ID NO: 127345 - protein, 27 aa, Artificial Sequence
  Cyclic GFR-binding peptide
IGKTPKINSLQEIVNSSDDYYVVPLPE

SEQ ID NO: 127346 - protein, 29 aa, Artificial Sequence
  Cyclic GFR-binding peptide
IGKTPKISMEGIHQGQHPKIRMIQMTINS

SEQ ID NO: 127347 - protein, 29 aa, Artificial Sequence
  Cyclic GFR-binding peptide
IGKTPKIVTAKKLKPKKRVYEIKRVQVPR

SEQ ID NO: 127348 - protein, 27 aa, Artificial Sequence
  Cyclic GFR-binding peptide
IGKTPKISMEGIVVKDYEDMIQMTINS

SEQ ID NO: 127349 - protein, 29 aa, Artificial Sequence
  Cyclic GFR-binding peptide
IGKTPKIVQVEKHQGQHPKIRVKAMKVSR

SEQ ID NO: 127350 - protein, 27 aa, Artificial Sequence
  Cyclic GFR-binding peptide
IGKTPKIVTAKKIKPTKGIIKRIQVPR

SEQ ID NO: 127351 - protein, 27 aa, Artificial Sequence
  Cyclic GFR-binding peptide
IGKTPKISMEGIVKPTRGVMIQITINS

SEQ ID NO: 127352 - protein, 29 aa, Artificial Sequence
  Cyclic GFR-binding peptide
IGKTPKINSLQEFIPKKRVIEYYVVPLPE

SEQ ID NO: 127353 - protein, 27 aa, Artificial Sequence
  Cyclic GFR-binding peptide
IGKTPKIVQVEKVKPKRGVVKAIKVSR

SEQ ID NO: 127354 - protein, 27 aa, Artificial Sequence
  Cyclic GFR-binding peptide
IGKTPKIVQVEKVVKENEDVKAMKVSR

SEQ ID NO: 127355 - protein, 27 aa, Artificial Sequence
  Cyclic GFR-binding peptide
IGKTPKINSLQEVVKENEDYYVMPLPE

SEQ ID NO: 127356 - protein, 27 aa, Artificial Sequence
  Cyclic GFR-binding peptide
IGKTPKIVTAKKIVNSSDDIKRVQVPR

SEQ ID NO: 127357 - protein, 27 aa, Artificial Sequence
  Cyclic GFR-binding peptide
IGKTPKIVQVEKIKPTKGIVKAIKVSR

SEQ ID NO: 127358 - protein, 27 aa, Artificial Sequence
  Cyclic GFR-binding peptide
IGKTPKINSLQEIKPTKGIYYLITLPE

SEQ ID NO: 127359 - protein, 29 aa, Artificial Sequence
  Cyclic GFR-binding peptide
IGKTPKINSLQEFIPKKRVIEYYLVTLPE

SEQ ID NO: 127360 - protein, 27 aa, Artificial Sequence
  Cyclic GFR-binding peptide
IGKTPKIVQVEKIVNSSDDVKAVKVSR

SEQ ID NO: 127361 - protein, 27 aa, Artificial Sequence
  Cyclic GFR-binding peptide
IGKTPKINSLQEIVNSSDDYYLVTLPE

SEQ ID NO: 127362 - protein, 29 aa, Artificial Sequence
  Cyclic GFR-binding peptide
IGKTPKIVQVEKLKPKKRVYEVKAVKVSR

SEQ ID NO: 127363 - protein, 29 aa, Artificial Sequence
  Cyclic GFR-binding peptide
IGKTPKIVQVEKFIPKKRVIEVKAVKVSR

SEQ ID NO: 127364 - protein, 29 aa, Artificial Sequence
  Cyclic GFR-binding peptide
IGKTPKIVTAKKHQGQHPKIRIKRMQVPR

SEQ ID NO: 127365 - protein, 27 aa, Artificial Sequence
  Cyclic GFR-binding peptide
IGKTPKINSLQEVVKENEDYYLMTLPE

SEQ ID NO: 127366 - protein, 29 aa, Artificial Sequence
  Cyclic GFR-binding peptide
IGKTPKISMEGIFIPKKRVIEMIQVTINS

SEQ ID NO: 127367 - protein, 27 aa, Artificial Sequence
  Cyclic GFR-binding peptide
IGKTPKINSLQEVKPKRGVYYVIPLPE

SEQ ID NO: 127368 - protein, 27 aa, Artificial Sequence
  Cyclic GFR-binding peptide
IGKTPKIVTAKKVKPKRGVIKRIQVPR

SEQ ID NO: 127369 - protein, 27 aa, Artificial Sequence
  Cyclic GFR-binding peptide
IGKTPKINSLQEVKPTRGVYYLITLPE

SEQ ID NO: 127370 - protein, 27 aa, Artificial Sequence
  Cyclic GFR-binding peptide
IGKTPKIVQVEKVKPTRGVVKAIKVSR

SEQ ID NO: 127371 - protein, 29 aa, Artificial Sequence
  Cyclic GFR-binding peptide
IGKTPKISMEGILKPKKRVYEMIQVTINS

SEQ ID NO: 127372 - protein, 27 aa, Artificial Sequence
  Cyclic GFR-binding peptide
IGKTPKINSLQEVVKDYEDYYVMPLPE

SEQ ID NO: 127373 - protein, 27 aa, Artificial Sequence
  Cyclic GFR-binding peptide
IGKTPKIVTAKKVKPTRGVIKRIQVPR

SEQ ID NO: 127374 - protein, 29 aa, Artificial Sequence
  Cyclic GFR-binding peptide
IGKTPKINSLQELKPKKRVYEYYLVTLPE

SEQ ID NO: 127375 - protein, 27 aa, Artificial Sequence
  Cyclic GFR-binding peptide
IGKTPKISMEGIVKPKRGVMIQITINS

SEQ ID NO: 127376 - protein, 27 aa, Artificial Sequence
  Cyclic GFR-binding peptide
IGKTPKISMEGIVVKENEDMIQMTINS

SEQ ID NO: 127377 - protein, 27 aa, Artificial Sequence
  Cyclic GFR-binding peptide
IGKTPKISMEGIIKPTKGIMIQITINS

SEQ ID NO: 127378 - protein, 29 aa, Artificial Sequence
  Cyclic GFR-binding peptide
IGKTPKINSLQEHQGQHPKIRYYLMTLPE

SEQ ID NO: 127379 - protein, 27 aa, Artificial Sequence
  Cyclic GFR-binding peptide
IGKTPKIVTAKKVVKDYEDIKRMQVPR

SEQ ID NO: 127380 - protein, 29 aa, Artificial Sequence
  Cyclic GFR-binding peptide
IGKTPKINSLQEHQGQHPKIRYYVMPLPE

SEQ ID NO: 127381 - protein, 29 aa, Artificial Sequence
  Cyclic GFR-binding peptide
IGKTPKINSLQELKPKKRVYEYYVVPLPE

SEQ ID NO: 127382 - protein, 29 aa, Artificial Sequence
  Cyclic GFR-binding peptide
IGKTPKIVTAKKFIPKKRVIEIKRVQVPR

SEQ ID NO: 127383 - protein, 27 aa, Artificial Sequence
  Cyclic GFR-binding peptide
IGKTPKIVQVEKVVKDYEDVKAMKVSR

SEQ ID NO: 127384 - protein, 27 aa, Artificial Sequence
  Cyclic GFR-binding peptide
EPLTMLYYDEYDKVVEQLSNIGKTPKI

SEQ ID NO: 127385 - protein, 27 aa, Artificial Sequence
  Cyclic GFR-binding peptide
EPLPIVYYIGKTPKIEQLSNIGKTPKI

SEQ ID NO: 127386 - protein, 27 aa, Artificial Sequence
  Cyclic GFR-binding peptide
SNITVQIMDDSSNVIIGEMSIGKTPKI

SEQ ID NO: 127387 - protein, 27 aa, Artificial Sequence
  Cyclic GFR-binding peptide
EPLTILYYVGRKPKVEQLSNIGKTPKI

SEQ ID NO: 127388 - protein, 27 aa, Artificial Sequence
  Cyclic GFR-binding peptide
EPLPIVYYVGRTPKVEQLSNIGKTPKI

SEQ ID NO: 127389 - protein, 27 aa, Artificial Sequence
  Cyclic GFR-binding peptide
RPVQMRKIDENEKVVKKATVIGKTPKI

SEQ ID NO: 127390 - protein, 27 aa, Artificial Sequence
  Cyclic GFR-binding peptide
EPLPVVYYDDSSNVIEQLSNIGKTPKI

SEQ ID NO: 127391 - protein, 29 aa, Artificial Sequence
  Cyclic GFR-binding peptide
SNITMQIMRIKPHQGQHIGEMSIGKTPKI

SEQ ID NO: 127392 - protein, 29 aa, Artificial Sequence
  Cyclic GFR-binding peptide
RPVQVRKIEYVRKKPKLKKATVIGKTPKI

SEQ ID NO: 127393 - protein, 27 aa, Artificial Sequence
  Cyclic GFR-binding peptide
SNITMQIMDEYDKVVIGEMSIGKTPKI

SEQ ID NO: 127394 - protein, 29 aa, Artificial Sequence
  Cyclic GFR-binding peptide
RSVKMAKVRIKPHQGQHKEVQVIGKTPKI

SEQ ID NO: 127395 - protein, 27 aa, Artificial Sequence
  Cyclic GFR-binding peptide
RPVQIRKIIGKTPKIKKATVIGKTPKI

SEQ ID NO: 127396 - protein, 27 aa, Artificial Sequence
  Cyclic GFR-binding peptide
SNITIQIMVGRTPKVIGEMSIGKTPKI

SEQ ID NO: 127397 - protein, 29 aa, Artificial Sequence
  Cyclic GFR-binding peptide
EPLPVVYYEIVRKKPIFEQLSNIGKTPKI

SEQ ID NO: 127398 - protein, 27 aa, Artificial Sequence
  Cyclic GFR-binding peptide
RSVKIAKVVGRKPKVKEVQVIGKTPKI

SEQ ID NO: 127399 - protein, 27 aa, Artificial Sequence
  Cyclic GFR-binding peptide
RSVKMAKVDENEKVVKEVQVIGKTPKI

SEQ ID NO: 127400 - protein, 27 aa, Artificial Sequence
  Cyclic GFR-binding peptide
EPLPMVYYDENEKVVEQLSNIGKTPKI

SEQ ID NO: 127401 - protein, 27 aa, Artificial Sequence
  Cyclic GFR-binding peptide
RPVQVRKIDDSSNVIKKATVIGKTPKI

SEQ ID NO: 127402 - protein, 27 aa, Artificial Sequence
  Cyclic GFR-binding peptide
RSVKIAKVIGKTPKIKEVQVIGKTPKI

SEQ ID NO: 127403 - protein, 27 aa, Artificial Sequence
  Cyclic GFR-binding peptide
EPLTILYYIGKTPKIEQLSNIGKTPKI

SEQ ID NO: 127404 - protein, 29 aa, Artificial Sequence
  Cyclic GFR-binding peptide
EPLTVLYYEIVRKKPIFEQLSNIGKTPKI

SEQ ID NO: 127405 - protein, 27 aa, Artificial Sequence
  Cyclic GFR-binding peptide
RSVKVAKVDDSSNVIKEVQVIGKTPKI

SEQ ID NO: 127406 - protein, 27 aa, Artificial Sequence
  Cyclic GFR-binding peptide
EPLTVLYYDDSSNVIEQLSNIGKTPKI

SEQ ID NO: 127407 - protein, 29 aa, Artificial Sequence
  Cyclic GFR-binding peptide
RSVKVAKVEYVRKKPKLKEVQVIGKTPKI

SEQ ID NO: 127408 - protein, 29 aa, Artificial Sequence
  Cyclic GFR-binding peptide
RSVKVAKVEIVRKKPIFKEVQVIGKTPKI

SEQ ID NO: 127409 - protein, 29 aa, Artificial Sequence
  Cyclic GFR-binding peptide
RPVQMRKIRIKPHQGQHKKATVIGKTPKI

SEQ ID NO: 127410 - protein, 27 aa, Artificial Sequence
  Cyclic GFR-binding peptide
EPLTMLYYDENEKVVEQLSNIGKTPKI

SEQ ID NO: 127411 - protein, 29 aa, Artificial Sequence
  Cyclic GFR-binding peptide
SNITVQIMEIVRKKPIFIGEMSIGKTPKI

SEQ ID NO: 127412 - protein, 27 aa, Artificial Sequence
  Cyclic GFR-binding peptide
EPLPIVYYVGRKPKVEQLSNIGKTPKI

SEQ ID NO: 127413 - protein, 27 aa, Artificial Sequence
  Cyclic GFR-binding peptide
RPVQIRKIVGRKPKVKKATVIGKTPKI

SEQ ID NO: 127414 - protein, 27 aa, Artificial Sequence
  Cyclic GFR-binding peptide
EPLTILYYVGRTPKVEQLSNIGKTPKI

SEQ ID NO: 127415 - protein, 27 aa, Artificial Sequence
  Cyclic GFR-binding peptide
RSVKIAKVVGRTPKVKEVQVIGKTPKI

SEQ ID NO: 127416 - protein, 29 aa, Artificial Sequence
  Cyclic GFR-binding peptide
SNITVQIMEYVRKKPKLIGEMSIGKTPKI

SEQ ID NO: 127417 - protein, 27 aa, Artificial Sequence
  Cyclic GFR-binding peptide
EPLPMVYYDEYDKVVEQLSNIGKTPKI

SEQ ID NO: 127418 - protein, 27 aa, Artificial Sequence
  Cyclic GFR-binding peptide
RPVQIRKIVGRTPKVKKATVIGKTPKI

SEQ ID NO: 127419 - protein, 29 aa, Artificial Sequence
  Cyclic GFR-binding peptide
EPLTVLYYEYVRKKPKLEQLSNIGKTPKI

SEQ ID NO: 127420 - protein, 27 aa, Artificial Sequence
  Cyclic GFR-binding peptide
SNITIQIMVGRKPKVIGEMSIGKTPKI

SEQ ID NO: 127421 - protein, 27 aa, Artificial Sequence
  Cyclic GFR-binding peptide
SNITMQIMDENEKVVIGEMSIGKTPKI

SEQ ID NO: 127422 - protein, 27 aa, Artificial Sequence
  Cyclic GFR-binding peptide
SNITIQIMIGKTPKIIGEMSIGKTPKI

SEQ ID NO: 127423 - protein, 29 aa, Artificial Sequence
  Cyclic GFR-binding peptide
EPLTMLYYRIKPHQGQHEQLSNIGKTPKI

SEQ ID NO: 127424 - protein, 27 aa, Artificial Sequence
  Cyclic GFR-binding peptide
RPVQMRKIDEYDKVVKKATVIGKTPKI

SEQ ID NO: 127425 - protein, 29 aa, Artificial Sequence
  Cyclic GFR-binding peptide
EPLPMVYYRIKPHQGQHEQLSNIGKTPKI

SEQ ID NO: 127426 - protein, 29 aa, Artificial Sequence
  Cyclic GFR-binding peptide
EPLPVVYYEYVRKKPKLEQLSNIGKTPKI

SEQ ID NO: 127427 - protein, 29 aa, Artificial Sequence
  Cyclic GFR-binding peptide
RPVQVRKIEIVRKKPIFKKATVIGKTPKI

SEQ ID NO: 127428 - protein, 27 aa, Artificial Sequence
  Cyclic GFR-binding peptide
RSVKMAKVDEYDKVVKEVQVIGKTPKI

SEQ ID NO: 127429 - protein, 27 aa, Artificial Sequence
  Cyclic GFR-binding peptide
IGKTPKIRYKKLIIQQKDNFYLMSIAN

SEQ ID NO: 127430 - protein, 27 aa, Artificial Sequence
  Cyclic GFR-binding peptide
IGKTPKIRYKKLIVNNSSDFYLVSIAN

SEQ ID NO: 127431 - protein, 27 aa, Artificial Sequence
  Cyclic GFR-binding peptide
IGKTPKIRYKKLYTVVGKDFYLISIAN

SEQ ID NO: 127432 - protein, 27 aa, Artificial Sequence
  Cyclic GFR-binding peptide
IGKTPKIRYKKLIVNSSDDFYLVSIAN

SEQ ID NO: 127433 - protein, 27 aa, Artificial Sequence
  Cyclic GFR-binding peptide
IGKTPKIRYKKLVVKDYEDFYLMSIAN

SEQ ID NO: 127434 - protein, 27 aa, Artificial Sequence
  Cyclic GFR-binding peptide
IGKTPKIRYKKLLLVRGNDFYLMSIAN

SEQ ID NO: 127435 - protein, 27 aa, Artificial Sequence
  Cyclic GFR-binding peptide
IGKTPKIRYKKLVVKENEDFYLMSIAN

SEQ ID NO: 127436 - protein, 27 aa, Artificial Sequence
  Cyclic GFR-binding peptide
IGKTPKIRYKKLVVNNAADFYLISIAN

SEQ ID NO: 127437 - protein, 27 aa, Artificial Sequence
  Cyclic GFR-binding peptide
IGKTPKIRYKKLTPVGMDDFYLVSIAN

SEQ ID NO: 127438 - protein, 27 aa, Artificial Sequence
  Cyclic GFR-binding peptide
IGKTPKIRYKKLVVNNASDFYLISIAN

SEQ ID NO: 127439 - protein, 27 aa, Artificial Sequence
  Cyclic GFR-binding peptide
NAISMLYFNDKQQIILKKYRIGKTPKI

SEQ ID NO: 127440 - protein, 27 aa, Artificial Sequence
  Cyclic GFR-binding peptide
NAISVLYFDSSNNVILKKYRIGKTPKI

SEQ ID NO: 127441 - protein, 27 aa, Artificial Sequence
  Cyclic GFR-binding peptide
NAISILYFDKGVVTYLKKYRIGKTPKI

SEQ ID NO: 127442 - protein, 27 aa, Artificial Sequence
  Cyclic GFR-binding peptide
NAISVLYFDDSSNVILKKYRIGKTPKI

SEQ ID NO: 127443 - protein, 27 aa, Artificial Sequence
  Cyclic GFR-binding peptide
NAISMLYFDEYDKVVLKKYRIGKTPKI

SEQ ID NO: 127444 - protein, 27 aa, Artificial Sequence
  Cyclic GFR-binding peptide
NAISMLYFDNGRVLLLKKYRIGKTPKI

SEQ ID NO: 127445 - protein, 27 aa, Artificial Sequence
  Cyclic GFR-binding peptide
NAISMLYFDENEKVVLKKYRIGKTPKI

SEQ ID NO: 127446 - protein, 27 aa, Artificial Sequence
  Cyclic GFR-binding peptide
NAISILYFDAANNVVLKKYRIGKTPKI

SEQ ID NO: 127447 - protein, 27 aa, Artificial Sequence
  Cyclic GFR-binding peptide
NAISVLYFDDMGVPTLKKYRIGKTPKI

SEQ ID NO: 127448 - protein, 27 aa, Artificial Sequence
  Cyclic GFR-binding peptide
NAISILYFDSANNVVLKKYRIGKTPKI

SEQ ID NO: 127449 - protein, 27 aa, Artificial Sequence
  Cyclic GFR-binding peptide
IGKTPKIEYKFKVKPTRGVLYLISIPE

SEQ ID NO: 127450 - protein, 27 aa, Artificial Sequence
  Cyclic GFR-binding peptide
IGKTPKIYHYKLVVKDYEDKYLMSIPS

SEQ ID NO: 127451 - protein, 27 aa, Artificial Sequence
  Cyclic GFR-binding peptide
IGKTPKIEYKFKTPVGMDDLYLVSIPE

SEQ ID NO: 127452 - protein, 27 aa, Artificial Sequence
  Cyclic GFR-binding peptide
IGKTPKIRYKKLVVKDYEDFYLMSIAN

SEQ ID NO: 127453 - protein, 27 aa, Artificial Sequence
  Cyclic GFR-binding peptide
IGKTPKIRHKRLVKPKRGVYYLISTAS

SEQ ID NO: 127454 - protein, 27 aa, Artificial Sequence
  Cyclic GFR-binding peptide
IGKTPKIYHYKLVKPKRGVKYLISIPS

SEQ ID NO: 127455 - protein, 27 aa, Artificial Sequence
  Cyclic GFR-binding peptide
IGKTPKIEYKFKIKPTKGILYLISIPE

SEQ ID NO: 127456 - protein, 27 aa, Artificial Sequence
  Cyclic GFR-binding peptide
IGKTPKIEYKFKVVNKNEDLYLISIPE

SEQ ID NO: 127457 - protein, 27 aa, Artificial Sequence
  Cyclic GFR-binding peptide
IGKTPKIPIKGYVKPTRGVFYLINIPS

SEQ ID NO: 127458 - protein, 27 aa, Artificial Sequence
  Cyclic GFR-binding peptide
IGKTPKIPIKGYVVKENEDFYLMNIPS

SEQ ID NO: 127459 - protein, 27 aa, Artificial Sequence
  Cyclic GFR-binding peptide
IGKTPKIYHYKLYTVVGKDKYLISIPS

SEQ ID NO: 127460 - protein, 27 aa, Artificial Sequence
  Cyclic GFR-binding peptide
IGKTPKIEYKFKLLVRGNDLYLMSIPE

SEQ ID NO: 127461 - protein, 27 aa, Artificial Sequence
  Cyclic GFR-binding peptide
IGKTPKIRYKKLVKPKRGVFYLISIAN

SEQ ID NO: 127462 - protein, 27 aa, Artificial Sequence
  Cyclic GFR-binding peptide
IGKTPKIPIKGYTPVGMDDFYLVNIPS

SEQ ID NO: 127463 - protein, 27 aa, Artificial Sequence
  Cyclic GFR-binding peptide
IGKTPKIYHYKLVVNKNEDKYLISIPS

SEQ ID NO: 127464 - protein, 27 aa, Artificial Sequence
  Cyclic GFR-binding peptide
IGKTPKIYHYKLIVNSSDDKYLVSIPS

SEQ ID NO: 127465 - protein, 27 aa, Artificial Sequence
  Cyclic GFR-binding peptide
IGKTPKIPIKGYIVNSSDDFYLVNIPS

SEQ ID NO: 127466 - protein, 27 aa, Artificial Sequence
  Cyclic GFR-binding peptide
IGKTPKIRYKKLYTVVGKDFYLISIAN

SEQ ID NO: 127467 - protein, 27 aa, Artificial Sequence
  Cyclic GFR-binding peptide
IGKTPKIRHKRLLLVRGNDYYLMSTAS

SEQ ID NO: 127468 - protein, 27 aa, Artificial Sequence
  Cyclic GFR-binding peptide
IGKTPKIYHYKLLLVRGNDKYLMSIPS

SEQ ID NO: 127469 - protein, 27 aa, Artificial Sequence
  Cyclic GFR-binding peptide
IGKTPKIRYKKLIVNSSDDFYLVSIAN

SEQ ID NO: 127470 - protein, 27 aa, Artificial Sequence
  Cyclic GFR-binding peptide
IGKTPKIRHKRLVVNKNEDYYLISTAS

SEQ ID NO: 127471 - protein, 27 aa, Artificial Sequence
  Cyclic GFR-binding peptide
IGKTPKIRHKRLIKPTKGIYYLISTAS

SEQ ID NO: 127472 - protein, 27 aa, Artificial Sequence
  Cyclic GFR-binding peptide
IGKTPKIPIKGYYTVVGKDFYLINIPS

SEQ ID NO: 127473 - protein, 27 aa, Artificial Sequence
  Cyclic GFR-binding peptide
IGKTPKIYHYKLTPVGMDDKYLVSIPS

SEQ ID NO: 127474 - protein, 27 aa, Artificial Sequence
  Cyclic GFR-binding peptide
IGKTPKIRHKRLIVNNSSDYYLVSTAS

SEQ ID NO: 127475 - protein, 27 aa, Artificial Sequence
  Cyclic GFR-binding peptide
IGKTPKIRYKKLLLVRGNDFYLMSIAN

SEQ ID NO: 127476 - protein, 27 aa, Artificial Sequence
  Cyclic GFR-binding peptide
IGKTPKIYHYKLVKPTRGVKYLISIPS

SEQ ID NO: 127477 - protein, 27 aa, Artificial Sequence
  Cyclic GFR-binding peptide
IGKTPKIRHKRLIVNSSDDYYLVSTAS

SEQ ID NO: 127478 - protein, 27 aa, Artificial Sequence
  Cyclic GFR-binding peptide
IGKTPKIPIKGYLLVRGNDFYLMNIPS

SEQ ID NO: 127479 - protein, 27 aa, Artificial Sequence
  Cyclic GFR-binding peptide
IGKTPKIRYKKLVVNKNEDFYLISIAN

SEQ ID NO: 127480 - protein, 27 aa, Artificial Sequence
  Cyclic GFR-binding peptide
IGKTPKIEYKFKVVKDYEDLYLMSIPE

SEQ ID NO: 127481 - protein, 27 aa, Artificial Sequence
  Cyclic GFR-binding peptide
IGKTPKIPIKGYVVNKNEDFYLINIPS

SEQ ID NO: 127482 - protein, 27 aa, Artificial Sequence
  Cyclic GFR-binding peptide
IGKTPKIPIKGYIKPTKGIFYLINIPS

SEQ ID NO: 127483 - protein, 27 aa, Artificial Sequence
  Cyclic GFR-binding peptide
IGKTPKIEYKFKVVNNAADLYLISIPE

SEQ ID NO: 127484 - protein, 27 aa, Artificial Sequence
  Cyclic GFR-binding peptide
IGKTPKIRHKRLYTVVGKDYYLISTAS

SEQ ID NO: 127485 - protein, 27 aa, Artificial Sequence
  Cyclic GFR-binding peptide
IGKTPKIRYKKLIKPTKGIFYLISIAN

SEQ ID NO: 127486 - protein, 27 aa, Artificial Sequence
  Cyclic GFR-binding peptide
IGKTPKIPIKGYVVKDYEDFYLMNIPS

SEQ ID NO: 127487 - protein, 27 aa, Artificial Sequence
  Cyclic GFR-binding peptide
IGKTPKIEYKFKVVNNASDLYLISIPE

SEQ ID NO: 127488 - protein, 27 aa, Artificial Sequence
  Cyclic GFR-binding peptide
IGKTPKIRYKKLVKPTRGVFYLISIAN

SEQ ID NO: 127489 - protein, 27 aa, Artificial Sequence
  Cyclic GFR-binding peptide
IGKTPKIRHKRLVVKENEDYYLMSTAS

SEQ ID NO: 127490 - protein, 27 aa, Artificial Sequence
  Cyclic GFR-binding peptide
IGKTPKIYHYKLIKPTKGIKYLISIPS

SEQ ID NO: 127491 - protein, 27 aa, Artificial Sequence
  Cyclic GFR-binding peptide
IGKTPKIYHYKLVVKENEDKYLMSIPS

SEQ ID NO: 127492 - protein, 27 aa, Artificial Sequence
  Cyclic GFR-binding peptide
IGKTPKIRHKRLIIQQKDNYYLMSTAS

SEQ ID NO: 127493 - protein, 27 aa, Artificial Sequence
  Cyclic GFR-binding peptide
IGKTPKIRYKKLVVKENEDFYLMSIAN

SEQ ID NO: 127494 - protein, 27 aa, Artificial Sequence
  Cyclic GFR-binding peptide
IGKTPKIRYKKLVVNNAADFYLISIAN

SEQ ID NO: 127495 - protein, 27 aa, Artificial Sequence
  Cyclic GFR-binding peptide
IGKTPKIEYKFKIIQQKDNLYLMSIPE

SEQ ID NO: 127496 - protein, 27 aa, Artificial Sequence
  Cyclic GFR-binding peptide
IGKTPKIRYKKLTPVGMDDFYLVSIAN

SEQ ID NO: 127497 - protein, 27 aa, Artificial Sequence
  Cyclic GFR-binding peptide
IGKTPKIYHYKLVVNNAADKYLISIPS

SEQ ID NO: 127498 - protein, 27 aa, Artificial Sequence
  Cyclic GFR-binding peptide
IGKTPKIPIKGYIVNNSSDFYLVNIPS

SEQ ID NO: 127499 - protein, 27 aa, Artificial Sequence
  Cyclic GFR-binding peptide
IGKTPKIPIKGYVKPKRGVFYLINIPS

SEQ ID NO: 127500 - protein, 27 aa, Artificial Sequence
  Cyclic GFR-binding peptide
IGKTPKIRYKKLIIQQKDNFYLMSIAN

SEQ ID NO: 127501 - protein, 27 aa, Artificial Sequence
  Cyclic GFR-binding peptide
IGKTPKIPIKGYIIQQKDNFYLMNIPS

SEQ ID NO: 127502 - protein, 27 aa, Artificial Sequence
  Cyclic GFR-binding peptide
IGKTPKIRYKKLIVNNSSDFYLVSIAN

SEQ ID NO: 127503 - protein, 27 aa, Artificial Sequence
  Cyclic GFR-binding peptide
IGKTPKIPIKGYVVNNAADFYLINIPS

SEQ ID NO: 127504 - protein, 27 aa, Artificial Sequence
  Cyclic GFR-binding peptide
IGKTPKIRHKRLVKPTRGVYYLISTAS

SEQ ID NO: 127505 - protein, 27 aa, Artificial Sequence
  Cyclic GFR-binding peptide
IGKTPKIEYKFKIVNNSSDLYLVSIPE

SEQ ID NO: 127506 - protein, 27 aa, Artificial Sequence
  Cyclic GFR-binding peptide
IGKTPKIRHKRLVVNNASDYYLISTAS

SEQ ID NO: 127507 - protein, 27 aa, Artificial Sequence
  Cyclic GFR-binding peptide
IGKTPKIRHKRLTPVGMDDYYLVSTAS

SEQ ID NO: 127508 - protein, 27 aa, Artificial Sequence
  Cyclic GFR-binding peptide
IGKTPKIYHYKLIVNNSSDKYLVSIPS

SEQ ID NO: 127509 - protein, 27 aa, Artificial Sequence
  Cyclic GFR-binding peptide
IGKTPKIYHYKLVVNNASDKYLISIPS

SEQ ID NO: 127510 - protein, 27 aa, Artificial Sequence
  Cyclic GFR-binding peptide
IGKTPKIEYKFKIVNSSDDLYLVSIPE

SEQ ID NO: 127511 - protein, 27 aa, Artificial Sequence
  Cyclic GFR-binding peptide
IGKTPKIEYKFKVKPKRGVLYLISIPE

SEQ ID NO: 127512 - protein, 27 aa, Artificial Sequence
  Cyclic GFR-binding peptide
IGKTPKIRHKRLVVKDYEDYYLMSTAS

SEQ ID NO: 127513 - protein, 27 aa, Artificial Sequence
  Cyclic GFR-binding peptide
IGKTPKIEYKFKVVKENEDLYLMSIPE

SEQ ID NO: 127514 - protein, 27 aa, Artificial Sequence
  Cyclic GFR-binding peptide
IGKTPKIEYKFKYTVVGKDLYLISIPE

SEQ ID NO: 127515 - protein, 27 aa, Artificial Sequence
  Cyclic GFR-binding peptide
IGKTPKIPIKGYVVNNASDFYLINIPS

SEQ ID NO: 127516 - protein, 27 aa, Artificial Sequence
  Cyclic GFR-binding peptide
IGKTPKIYHYKLIIQQKDNKYLMSIPS

SEQ ID NO: 127517 - protein, 27 aa, Artificial Sequence
  Cyclic GFR-binding peptide
IGKTPKIRYKKLVVNNASDFYLISIAN

SEQ ID NO: 127518 - protein, 27 aa, Artificial Sequence
  Cyclic GFR-binding peptide
IGKTPKIRHKRLVVNNAADYYLISTAS

SEQ ID NO: 127519 - protein, 27 aa, Artificial Sequence
  Cyclic GFR-binding peptide
EPISILYLVGRTPKVKFKYEIGKTPKI

SEQ ID NO: 127520 - protein, 27 aa, Artificial Sequence
  Cyclic GFR-binding peptide
SPISMLYKDEYDKVVLKYHYIGKTPKI

SEQ ID NO: 127521 - protein, 27 aa, Artificial Sequence
  Cyclic GFR-binding peptide
EPISVLYLDDMGVPTKFKYEIGKTPKI

SEQ ID NO: 127522 - protein, 27 aa, Artificial Sequence
  Cyclic GFR-binding peptide
NAISMLYFDEYDKVVLKKYRIGKTPKI

SEQ ID NO: 127523 - protein, 27 aa, Artificial Sequence
  Cyclic GFR-binding peptide
SATSILYYVGRKPKVLRKHRIGKTPKI

SEQ ID NO: 127524 - protein, 27 aa, Artificial Sequence
  Cyclic GFR-binding peptide
SPISILYKVGRKPKVLKYHYIGKTPKI

SEQ ID NO: 127525 - protein, 27 aa, Artificial Sequence
  Cyclic GFR-binding peptide
EPISILYLIGKTPKIKFKYEIGKTPKI

SEQ ID NO: 127526 - protein, 27 aa, Artificial Sequence
  Cyclic GFR-binding peptide
EPISILYLDENKNVVKFKYEIGKTPKI

SEQ ID NO: 127527 - protein, 27 aa, Artificial Sequence
  Cyclic GFR-binding peptide
SPINILYFVGRTPKVYGKIPIGKTPKI

SEQ ID NO: 127528 - protein, 27 aa, Artificial Sequence
  Cyclic GFR-binding peptide
SPINMLYFDENEKVVYGKIPIGKTPKI

SEQ ID NO: 127529 - protein, 27 aa, Artificial Sequence
  Cyclic GFR-binding peptide
SPISILYKDKGVVTYLKYHYIGKTPKI

SEQ ID NO: 127530 - protein, 27 aa, Artificial Sequence
  Cyclic GFR-binding peptide
EPISMLYLDNGRVLLKFKYEIGKTPKI

SEQ ID NO: 127531 - protein, 27 aa, Artificial Sequence
  Cyclic GFR-binding peptide
NAISILYFVGRKPKVLKKYRIGKTPKI

SEQ ID NO: 127532 - protein, 27 aa, Artificial Sequence
  Cyclic GFR-binding peptide
SPINVLYFDDMGVPTYGKIPIGKTPKI

SEQ ID NO: 127533 - protein, 27 aa, Artificial Sequence
  Cyclic GFR-binding peptide
SPISILYKDENKNVVLKYHYIGKTPKI

SEQ ID NO: 127534 - protein, 27 aa, Artificial Sequence
  Cyclic GFR-binding peptide
SPISVLYKDDSSNVILKYHYIGKTPKI

SEQ ID NO: 127535 - protein, 27 aa, Artificial Sequence
  Cyclic GFR-binding peptide
SPINVLYFDDSSNVIYGKIPIGKTPKI

SEQ ID NO: 127536 - protein, 27 aa, Artificial Sequence
  Cyclic GFR-binding peptide
NAISILYFDKGVVTYLKKYRIGKTPKI

SEQ ID NO: 127537 - protein, 27 aa, Artificial Sequence
  Cyclic GFR-binding peptide
SATSMLYYDNGRVLLLRKHRIGKTPKI

SEQ ID NO: 127538 - protein, 27 aa, Artificial Sequence
  Cyclic GFR-binding peptide
SPISMLYKDNGRVLLLKYHYIGKTPKI

SEQ ID NO: 127539 - protein, 27 aa, Artificial Sequence
  Cyclic GFR-binding peptide
NAISVLYFDDSSNVILKKYRIGKTPKI

SEQ ID NO: 127540 - protein, 27 aa, Artificial Sequence
  Cyclic GFR-binding peptide
SATSILYYDENKNVVLRKHRIGKTPKI

SEQ ID NO: 127541 - protein, 27 aa, Artificial Sequence
  Cyclic GFR-binding peptide
SATSILYYIGKTPKILRKHRIGKTPKI

SEQ ID NO: 127542 - protein, 27 aa, Artificial Sequence
  Cyclic GFR-binding peptide
SPINILYFDKGVVTYYGKIPIGKTPKI

SEQ ID NO: 127543 - protein, 27 aa, Artificial Sequence
  Cyclic GFR-binding peptide
SPISVLYKDDMGVPTLKYHYIGKTPKI

SEQ ID NO: 127544 - protein, 27 aa, Artificial Sequence
  Cyclic GFR-binding peptide
SATSVLYYDSSNNVILRKHRIGKTPKI

SEQ ID NO: 127545 - protein, 27 aa, Artificial Sequence
  Cyclic GFR-binding peptide
NAISMLYFDNGRVLLLKKYRIGKTPKI

SEQ ID NO: 127546 - protein, 27 aa, Artificial Sequence
  Cyclic GFR-binding peptide
SPISILYKVGRTPKVLKYHYIGKTPKI

SEQ ID NO: 127547 - protein, 27 aa, Artificial Sequence
  Cyclic GFR-binding peptide
SATSVLYYDDSSNVILRKHRIGKTPKI

SEQ ID NO: 127548 - protein, 27 aa, Artificial Sequence
  Cyclic GFR-binding peptide
SPINMLYFDNGRVLLYGKIPIGKTPKI

SEQ ID NO: 127549 - protein, 27 aa, Artificial Sequence
  Cyclic GFR-binding peptide
NAISILYFDENKNVVLKKYRIGKTPKI

SEQ ID NO: 127550 - protein, 27 aa, Artificial Sequence
  Cyclic GFR-binding peptide
EPISMLYLDEYDKVVKFKYEIGKTPKI

SEQ ID NO: 127551 - protein, 27 aa, Artificial Sequence
  Cyclic GFR-binding peptide
SPINILYFDENKNVVYGKIPIGKTPKI

SEQ ID NO: 127552 - protein, 27 aa, Artificial Sequence
  Cyclic GFR-binding peptide
SPINILYFIGKTPKIYGKIPIGKTPKI

SEQ ID NO: 127553 - protein, 27 aa, Artificial Sequence
  Cyclic GFR-binding peptide
EPISILYLDAANNVVKFKYEIGKTPKI

SEQ ID NO: 127554 - protein, 27 aa, Artificial Sequence
  Cyclic GFR-binding peptide
SATSILYYDKGVVTYLRKHRIGKTPKI

SEQ ID NO: 127555 - protein, 27 aa, Artificial Sequence
  Cyclic GFR-binding peptide
NAISILYFIGKTPKILKKYRIGKTPKI

SEQ ID NO: 127556 - protein, 27 aa, Artificial Sequence
  Cyclic GFR-binding peptide
SPINMLYFDEYDKVVYGKIPIGKTPKI

SEQ ID NO: 127557 - protein, 27 aa, Artificial Sequence
  Cyclic GFR-binding peptide
EPISILYLDSANNVVKFKYEIGKTPKI

SEQ ID NO: 127558 - protein, 27 aa, Artificial Sequence
  Cyclic GFR-binding peptide
NAISILYFVGRTPKVLKKYRIGKTPKI

SEQ ID NO: 127559 - protein, 27 aa, Artificial Sequence
  Cyclic GFR-binding peptide
SATSMLYYDENEKVVLRKHRIGKTPKI

SEQ ID NO: 127560 - protein, 27 aa, Artificial Sequence
  Cyclic GFR-binding peptide
SPISILYKIGKTPKILKYHYIGKTPKI

SEQ ID NO: 127561 - protein, 27 aa, Artificial Sequence
  Cyclic GFR-binding peptide
SPISMLYKDENEKVVLKYHYIGKTPKI

SEQ ID NO: 127562 - protein, 27 aa, Artificial Sequence
  Cyclic GFR-binding peptide
SATSMLYYNDKQQIILRKHRIGKTPKI

SEQ ID NO: 127563 - protein, 27 aa, Artificial Sequence
  Cyclic GFR-binding peptide
NAISMLYFDENEKVVLKKYRIGKTPKI

SEQ ID NO: 127564 - protein, 27 aa, Artificial Sequence
  Cyclic GFR-binding peptide
NAISILYFDAANNVVLKKYRIGKTPKI

SEQ ID NO: 127565 - protein, 27 aa, Artificial Sequence
  Cyclic GFR-binding peptide
EPISMLYLNDKQQIIKFKYEIGKTPKI

SEQ ID NO: 127566 - protein, 27 aa, Artificial Sequence
  Cyclic GFR-binding peptide
NAISVLYFDDMGVPTLKKYRIGKTPKI

SEQ ID NO: 127567 - protein, 27 aa, Artificial Sequence
  Cyclic GFR-binding peptide
SPISILYKDAANNVVLKYHYIGKTPKI

SEQ ID NO: 127568 - protein, 27 aa, Artificial Sequence
  Cyclic GFR-binding peptide
SPINVLYFDSSNNVIYGKIPIGKTPKI

SEQ ID NO: 127569 - protein, 27 aa, Artificial Sequence
  Cyclic GFR-binding peptide
SPINILYFVGRKPKVYGKIPIGKTPKI

SEQ ID NO: 127570 - protein, 27 aa, Artificial Sequence
  Cyclic GFR-binding peptide
NAISMLYFNDKQQIILKKYRIGKTPKI

SEQ ID NO: 127571 - protein, 27 aa, Artificial Sequence
  Cyclic GFR-binding peptide
SPINMLYFNDKQQIIYGKIPIGKTPKI

SEQ ID NO: 127572 - protein, 27 aa, Artificial Sequence
  Cyclic GFR-binding peptide
NAISVLYFDSSNNVILKKYRIGKTPKI

SEQ ID NO: 127573 - protein, 27 aa, Artificial Sequence
  Cyclic GFR-binding peptide
SPINILYFDAANNVVYGKIPIGKTPKI

SEQ ID NO: 127574 - protein, 27 aa, Artificial Sequence
  Cyclic GFR-binding peptide
SATSILYYVGRTPKVLRKHRIGKTPKI

SEQ ID NO: 127575 - protein, 27 aa, Artificial Sequence
  Cyclic GFR-binding peptide
EPISVLYLDSSNNVIKFKYEIGKTPKI

SEQ ID NO: 127576 - protein, 27 aa, Artificial Sequence
  Cyclic GFR-binding peptide
SATSILYYDSANNVVLRKHRIGKTPKI

SEQ ID NO: 127577 - protein, 27 aa, Artificial Sequence
  Cyclic GFR-binding peptide
SATSVLYYDDMGVPTLRKHRIGKTPKI

SEQ ID NO: 127578 - protein, 27 aa, Artificial Sequence
  Cyclic GFR-binding peptide
SPISVLYKDSSNNVILKYHYIGKTPKI

SEQ ID NO: 127579 - protein, 27 aa, Artificial Sequence
  Cyclic GFR-binding peptide
SPISILYKDSANNVVLKYHYIGKTPKI

SEQ ID NO: 127580 - protein, 27 aa, Artificial Sequence
  Cyclic GFR-binding peptide
EPISVLYLDDSSNVIKFKYEIGKTPKI

SEQ ID NO: 127581 - protein, 27 aa, Artificial Sequence
  Cyclic GFR-binding peptide
EPISILYLVGRKPKVKFKYEIGKTPKI

SEQ ID NO: 127582 - protein, 27 aa, Artificial Sequence
  Cyclic GFR-binding peptide
SATSMLYYDEYDKVVLRKHRIGKTPKI

SEQ ID NO: 127583 - protein, 27 aa, Artificial Sequence
  Cyclic GFR-binding peptide
EPISMLYLDENEKVVKFKYEIGKTPKI

SEQ ID NO: 127584 - protein, 27 aa, Artificial Sequence
  Cyclic GFR-binding peptide
EPISILYLDKGVVTYKFKYEIGKTPKI

SEQ ID NO: 127585 - protein, 27 aa, Artificial Sequence
  Cyclic GFR-binding peptide
SPINILYFDSANNVVYGKIPIGKTPKI

SEQ ID NO: 127586 - protein, 27 aa, Artificial Sequence
  Cyclic GFR-binding peptide
SPISMLYKNDKQQIILKYHYIGKTPKI

SEQ ID NO: 127587 - protein, 27 aa, Artificial Sequence
  Cyclic GFR-binding peptide
NAISILYFDSANNVVLKKYRIGKTPKI

SEQ ID NO: 127588 - protein, 27 aa, Artificial Sequence
  Cyclic GFR-binding peptide
SATSILYYDAANNVVLRKHRIGKTPKI

SEQ ID NO: 127589 - protein, 27 aa, Artificial Sequence
  Cyclic GFR-binding peptide
IGKTPKISMEGIIIQQKDNMIQMTINS

SEQ ID NO: 127590 - protein, 27 aa, Artificial Sequence
  Cyclic GFR-binding peptide
IGKTPKISMEGIIVNSSDDMIQVTINS

SEQ ID NO: 127591 - protein, 27 aa, Artificial Sequence
  Cyclic GFR-binding peptide
IGKTPKISMEGLVKPKRGVMIQITINS

SEQ ID NO: 127592 - protein, 27 aa, Artificial Sequence
  Cyclic GFR-binding peptide
IGKTPKISMEGLVVNNASDMIQITINS

SEQ ID NO: 127593 - protein, 29 aa, Artificial Sequence
  Cyclic GFR-binding peptide
IGKTPKISMEGIFIPKKRVIEMIQVTINS

SEQ ID NO: 127594 - protein, 27 aa, Artificial Sequence
  Cyclic GFR-binding peptide
IGKTPKISMEGILLVRGNDMIQMTINS

SEQ ID NO: 127595 - protein, 29 aa, Artificial Sequence
  Cyclic GFR-binding peptide
IGKTPKISMEGILKPKKRVYEMIQVTINS

SEQ ID NO: 127596 - protein, 27 aa, Artificial Sequence
  Cyclic GFR-binding peptide
IGKTPKISMEGLIKPTKGIMIQITINS

SEQ ID NO: 127597 - protein, 27 aa, Artificial Sequence
  Cyclic GFR-binding peptide
IGKTPKISMEGLIVNSSDDMIQVTINS

SEQ ID NO: 127598 - protein, 29 aa, Artificial Sequence
  Cyclic GFR-binding peptide
IGKTPKISMEGIHQGQHPKIRMIQMTINS

SEQ ID NO: 127599 - protein, 27 aa, Artificial Sequence
  Cyclic GFR-binding peptide
IGKTPKISMEGIVVNNASDMIQITINS

SEQ ID NO: 127600 - protein, 29 aa, Artificial Sequence
  Cyclic GFR-binding peptide
IGKTPKISMEGLLKPKKRVYEMIQVTINS

SEQ ID NO: 127601 - protein, 27 aa, Artificial Sequence
  Cyclic GFR-binding peptide
IGKTPKISMEGIVKPKRGVMIQITINS

SEQ ID NO: 127602 - protein, 27 aa, Artificial Sequence
  Cyclic GFR-binding peptide
IGKTPKISMEGIVKPTRGVMIQITINS

SEQ ID NO: 127603 - protein, 27 aa, Artificial Sequence
  Cyclic GFR-binding peptide
IGKTPKISMEGLVVNNAADMIQITINS

SEQ ID NO: 127604 - protein, 27 aa, Artificial Sequence
  Cyclic GFR-binding peptide
IGKTPKISMEGLLLVRGNDMIQMTINS

SEQ ID NO: 127605 - protein, 27 aa, Artificial Sequence
  Cyclic GFR-binding peptide
IGKTPKISMEGIIKPTKGIMIQITINS

SEQ ID NO: 127606 - protein, 27 aa, Artificial Sequence
  Cyclic GFR-binding peptide
IGKTPKISMEGLIIQQKDNMIQMTINS

SEQ ID NO: 127607 - protein, 29 aa, Artificial Sequence
  Cyclic GFR-binding peptide
IGKTPKISMEGLHQGQHPKIRMIQMTINS

SEQ ID NO: 127608 - protein, 27 aa, Artificial Sequence
  Cyclic GFR-binding peptide
IGKTPKISMEGIVVNNAADMIQITINS

SEQ ID NO: 127609 - protein, 29 aa, Artificial Sequence
  Cyclic GFR-binding peptide
IGKTPKISMEGLFIPKKRVIEMIQVTINS

SEQ ID NO: 127610 - protein, 27 aa, Artificial Sequence
  Cyclic GFR-binding peptide
IGKTPKISMEGLVKPTRGVMIQITINS

SEQ ID NO: 127611 - protein, 27 aa, Artificial Sequence
  Cyclic GFR-binding peptide
SNITMQIMNDKQQIIIGEMSIGKTPKI

SEQ ID NO: 127612 - protein, 27 aa, Artificial Sequence
  Cyclic GFR-binding peptide
SNITVQIMDDSSNVIIGEMSIGKTPKI

SEQ ID NO: 127613 - protein, 27 aa, Artificial Sequence
  Cyclic GFR-binding peptide
SNITIQIMVGRKPKVLGEMSIGKTPKI

SEQ ID NO: 127614 - protein, 27 aa, Artificial Sequence
  Cyclic GFR-binding peptide
SNITIQIMDSANNVVLGEMSIGKTPKI

SEQ ID NO: 127615 - protein, 29 aa, Artificial Sequence
  Cyclic GFR-binding peptide
SNITVQIMEIVRKKPIFIGEMSIGKTPKI

SEQ ID NO: 127616 - protein, 27 aa, Artificial Sequence
  Cyclic GFR-binding peptide
SNITMQIMDNGRVLLIGEMSIGKTPKI

SEQ ID NO: 127617 - protein, 29 aa, Artificial Sequence
  Cyclic GFR-binding peptide
SNITVQIMEYVRKKPKLIGEMSIGKTPKI

SEQ ID NO: 127618 - protein, 27 aa, Artificial Sequence
  Cyclic GFR-binding peptide
SNITIQIMIGKTPKILGEMSIGKTPKI

SEQ ID NO: 127619 - protein, 27 aa, Artificial Sequence
  Cyclic GFR-binding peptide
SNITVQIMDDSSNVILGEMSIGKTPKI

SEQ ID NO: 127620 - protein, 29 aa, Artificial Sequence
  Cyclic GFR-binding peptide
SNITMQIMRIKPHQGQHIGEMSIGKTPKI

SEQ ID NO: 127621 - protein, 27 aa, Artificial Sequence
  Cyclic GFR-binding peptide
SNITIQIMDSANNVVIGEMSIGKTPKI

SEQ ID NO: 127622 - protein, 29 aa, Artificial Sequence
  Cyclic GFR-binding peptide
SNITVQIMEYVRKKPKLLGEMSIGKTPKI

SEQ ID NO: 127623 - protein, 27 aa, Artificial Sequence
  Cyclic GFR-binding peptide
SNITIQIMVGRKPKVIGEMSIGKTPKI

SEQ ID NO: 127624 - protein, 27 aa, Artificial Sequence
  Cyclic GFR-binding peptide
SNITIQIMVGRTPKVIGEMSIGKTPKI

SEQ ID NO: 127625 - protein, 27 aa, Artificial Sequence
  Cyclic GFR-binding peptide
SNITIQIMDAANNVVLGEMSIGKTPKI

SEQ ID NO: 127626 - protein, 27 aa, Artificial Sequence
  Cyclic GFR-binding peptide
SNITMQIMDNGRVLLLGEMSIGKTPKI

SEQ ID NO: 127627 - protein, 27 aa, Artificial Sequence
  Cyclic GFR-binding peptide
SNITIQIMIGKTPKIIGEMSIGKTPKI

SEQ ID NO: 127628 - protein, 27 aa, Artificial Sequence
  Cyclic GFR-binding peptide
SNITMQIMNDKQQIILGEMSIGKTPKI

SEQ ID NO: 127629 - protein, 29 aa, Artificial Sequence
  Cyclic GFR-binding peptide
SNITMQIMRIKPHQGQHLGEMSIGKTPKI

SEQ ID NO: 127630 - protein, 27 aa, Artificial Sequence
  Cyclic GFR-binding peptide
SNITIQIMDAANNVVIGEMSIGKTPKI

SEQ ID NO: 127631 - protein, 29 aa, Artificial Sequence
  Cyclic GFR-binding peptide
SNITVQIMEIVRKKPIFLGEMSIGKTPKI

SEQ ID NO: 127632 - protein, 27 aa, Artificial Sequence
  Cyclic GFR-binding peptide
SNITIQIMVGRTPKVLGEMSIGKTPKI

SEQ ID NO: 127633 - protein, 27 aa, Artificial Sequence
  Cyclic GFR-binding peptide
IGKTPKIRYKKLIKPTKGIFYLISIAN

SEQ ID NO: 127634 - protein, 27 aa, Artificial Sequence
  Cyclic GFR-binding peptide
IGKTPKIQYNKLVVNKNEDLYLISIAS

SEQ ID NO: 127635 - protein, 27 aa, Artificial Sequence
  Cyclic GFR-binding peptide
IGKTPKIQYNKLVVNNAADLYLISIAS

SEQ ID NO: 127636 - protein, 27 aa, Artificial Sequence
  Cyclic GFR-binding peptide
IGKTPKIQYNKLIVNNSSDLYLVSIAS

SEQ ID NO: 127637 - protein, 27 aa, Artificial Sequence
  Cyclic GFR-binding peptide
IGKTPKIRYKKLVVKDYEDFYLMSIAN

SEQ ID NO: 127638 - protein, 27 aa, Artificial Sequence
  Cyclic GFR-binding peptide
IGKTPKIRYKKLVKPTRGVFYLISIAN

SEQ ID NO: 127639 - protein, 27 aa, Artificial Sequence
  Cyclic GFR-binding peptide
IGKTPKIQYNKLIIQQKDNLYLMSIAS

SEQ ID NO: 127640 - protein, 27 aa, Artificial Sequence
  Cyclic GFR-binding peptide
IGKTPKIQYNKLLLVRGNDLYLMSIAS

SEQ ID NO: 127641 - protein, 27 aa, Artificial Sequence
  Cyclic GFR-binding peptide
IGKTPKIQYNKLVKPTRGVLYLISIAS

SEQ ID NO: 127642 - protein, 27 aa, Artificial Sequence
  Cyclic GFR-binding peptide
IGKTPKIRYKKLVVKENEDFYLMSIAN

SEQ ID NO: 127643 - protein, 27 aa, Artificial Sequence
  Cyclic GFR-binding peptide
IGKTPKIRYKKLVVNNAADFYLISIAN

SEQ ID NO: 127644 - protein, 27 aa, Artificial Sequence
  Cyclic GFR-binding peptide
IGKTPKIQYNKLTPVGMDDLYLVSIAS

SEQ ID NO: 127645 - protein, 27 aa, Artificial Sequence
  Cyclic GFR-binding peptide
IGKTPKIRYKKLTPVGMDDFYLVSIAN

SEQ ID NO: 127646 - protein, 27 aa, Artificial Sequence
  Cyclic GFR-binding peptide
IGKTPKIRYKKLVKPKRGVFYLISIAN

SEQ ID NO: 127647 - protein, 27 aa, Artificial Sequence
  Cyclic GFR-binding peptide
IGKTPKIQYNKLVVKENEDLYLMSIAS

SEQ ID NO: 127648 - protein, 27 aa, Artificial Sequence
  Cyclic GFR-binding peptide
IGKTPKIRYKKLIIQQKDNFYLMSIAN

SEQ ID NO: 127649 - protein, 27 aa, Artificial Sequence
  Cyclic GFR-binding peptide
IGKTPKIQYNKLVKPKRGVLYLISIAS

SEQ ID NO: 127650 - protein, 27 aa, Artificial Sequence
  Cyclic GFR-binding peptide
IGKTPKIRYKKLIVNNSSDFYLVSIAN

SEQ ID NO: 127651 - protein, 27 aa, Artificial Sequence
  Cyclic GFR-binding peptide
IGKTPKIRYKKLYTVVGKDFYLISIAN

SEQ ID NO: 127652 - protein, 27 aa, Artificial Sequence
  Cyclic GFR-binding peptide
IGKTPKIRYKKLIVNSSDDFYLVSIAN

SEQ ID NO: 127653 - protein, 27 aa, Artificial Sequence
  Cyclic GFR-binding peptide
IGKTPKIRYKKLLLVRGNDFYLMSIAN

SEQ ID NO: 127654 - protein, 27 aa, Artificial Sequence
  Cyclic GFR-binding peptide
IGKTPKIQYNKLVVNNASDLYLISIAS

SEQ ID NO: 127655 - protein, 27 aa, Artificial Sequence
  Cyclic GFR-binding peptide
IGKTPKIQYNKLIKPTKGILYLISIAS

SEQ ID NO: 127656 - protein, 27 aa, Artificial Sequence
  Cyclic GFR-binding peptide
IGKTPKIRYKKLVVNKNEDFYLISIAN

SEQ ID NO: 127657 - protein, 27 aa, Artificial Sequence
  Cyclic GFR-binding peptide
IGKTPKIQYNKLYTVVGKDLYLISIAS

SEQ ID NO: 127658 - protein, 27 aa, Artificial Sequence
  Cyclic GFR-binding peptide
IGKTPKIQYNKLVVKDYEDLYLMSIAS

SEQ ID NO: 127659 - protein, 27 aa, Artificial Sequence
  Cyclic GFR-binding peptide
IGKTPKIRYKKLVVNNASDFYLISIAN

SEQ ID NO: 127660 - protein, 27 aa, Artificial Sequence
  Cyclic GFR-binding peptide
IGKTPKIQYNKLIVNSSDDLYLVSIAS

SEQ ID NO: 127661 - protein, 27 aa, Artificial Sequence
  Cyclic GFR-binding peptide
NAISILYFIGKTPKILKKYRIGKTPKI

SEQ ID NO: 127662 - protein, 27 aa, Artificial Sequence
  Cyclic GFR-binding peptide
SAISILYLDENKNVVLKNYQIGKTPKI

SEQ ID NO: 127663 - protein, 27 aa, Artificial Sequence
  Cyclic GFR-binding peptide
SAISILYLDAANNVVLKNYQIGKTPKI

SEQ ID NO: 127664 - protein, 27 aa, Artificial Sequence
  Cyclic GFR-binding peptide
SAISVLYLDSSNNVILKNYQIGKTPKI

SEQ ID NO: 127665 - protein, 27 aa, Artificial Sequence
  Cyclic GFR-binding peptide
NAISMLYFDEYDKVVLKKYRIGKTPKI

SEQ ID NO: 127666 - protein, 27 aa, Artificial Sequence
  Cyclic GFR-binding peptide
NAISILYFVGRTPKVLKKYRIGKTPKI

SEQ ID NO: 127667 - protein, 27 aa, Artificial Sequence
  Cyclic GFR-binding peptide
SAISMLYLNDKQQIILKNYQIGKTPKI

SEQ ID NO: 127668 - protein, 27 aa, Artificial Sequence
  Cyclic GFR-binding peptide
SAISMLYLDNGRVLLLKNYQIGKTPKI

SEQ ID NO: 127669 - protein, 27 aa, Artificial Sequence
  Cyclic GFR-binding peptide
SAISILYLVGRTPKVLKNYQIGKTPKI

SEQ ID NO: 127670 - protein, 27 aa, Artificial Sequence
  Cyclic GFR-binding peptide
NAISMLYFDENEKVVLKKYRIGKTPKI

SEQ ID NO: 127671 - protein, 27 aa, Artificial Sequence
  Cyclic GFR-binding peptide
NAISILYFDAANNVVLKKYRIGKTPKI

SEQ ID NO: 127672 - protein, 27 aa, Artificial Sequence
  Cyclic GFR-binding peptide
SAISVLYLDDMGVPTLKNYQIGKTPKI

SEQ ID NO: 127673 - protein, 27 aa, Artificial Sequence
  Cyclic GFR-binding peptide
NAISVLYFDDMGVPTLKKYRIGKTPKI

SEQ ID NO: 127674 - protein, 27 aa, Artificial Sequence
  Cyclic GFR-binding peptide
NAISILYFVGRKPKVLKKYRIGKTPKI

SEQ ID NO: 127675 - protein, 27 aa, Artificial Sequence
  Cyclic GFR-binding peptide
SAISMLYLDENEKVVLKNYQIGKTPKI

SEQ ID NO: 127676 - protein, 27 aa, Artificial Sequence
  Cyclic GFR-binding peptide
NAISMLYFNDKQQIILKKYRIGKTPKI

SEQ ID NO: 127677 - protein, 27 aa, Artificial Sequence
  Cyclic GFR-binding peptide
SAISILYLVGRKPKVLKNYQIGKTPKI

SEQ ID NO: 127678 - protein, 27 aa, Artificial Sequence
  Cyclic GFR-binding peptide
NAISVLYFDSSNNVILKKYRIGKTPKI

SEQ ID NO: 127679 - protein, 27 aa, Artificial Sequence
  Cyclic GFR-binding peptide
NAISILYFDKGVVTYLKKYRIGKTPKI

SEQ ID NO: 127680 - protein, 27 aa, Artificial Sequence
  Cyclic GFR-binding peptide
NAISVLYFDDSSNVILKKYRIGKTPKI

SEQ ID NO: 127681 - protein, 27 aa, Artificial Sequence
  Cyclic GFR-binding peptide
NAISMLYFDNGRVLLLKKYRIGKTPKI

SEQ ID NO: 127682 - protein, 27 aa, Artificial Sequence
  Cyclic GFR-binding peptide
SAISILYLDSANNVVLKNYQIGKTPKI

SEQ ID NO: 127683 - protein, 27 aa, Artificial Sequence
  Cyclic GFR-binding peptide
SAISILYLIGKTPKILKNYQIGKTPKI

SEQ ID NO: 127684 - protein, 27 aa, Artificial Sequence
  Cyclic GFR-binding peptide
NAISILYFDENKNVVLKKYRIGKTPKI

SEQ ID NO: 127685 - protein, 27 aa, Artificial Sequence
  Cyclic GFR-binding peptide
SAISILYLDKGVVTYLKNYQIGKTPKI

SEQ ID NO: 127686 - protein, 27 aa, Artificial Sequence
  Cyclic GFR-binding peptide
SAISMLYLDEYDKVVLKNYQIGKTPKI

SEQ ID NO: 127687 - protein, 27 aa, Artificial Sequence
  Cyclic GFR-binding peptide
NAISILYFDSANNVVLKKYRIGKTPKI

SEQ ID NO: 127688 - protein, 27 aa, Artificial Sequence
  Cyclic GFR-binding peptide
SAISVLYLDDSSNVILKNYQIGKTPKI

SEQ ID NO: 127689 - protein, 29 aa, Artificial Sequence
  Cyclic GFR-binding peptide
IGKTPKIVTAKKLKPKKRVYEIKRVQVPR

SEQ ID NO: 127690 - protein, 29 aa, Artificial Sequence
  Cyclic GFR-binding peptide
IGKTPKIVQVEKLKPKKRVYEVKAVKVSR

SEQ ID NO: 127691 - protein, 27 aa, Artificial Sequence
  Cyclic GFR-binding peptide
IGKTPKIVTAKKVKPTRGVIKRIQVPR

SEQ ID NO: 127692 - protein, 29 aa, Artificial Sequence
  Cyclic GFR-binding peptide
IGKTPKIVQVEKFIPKKRVIEVKAVKVSR

SEQ ID NO: 127693 - protein, 29 aa, Artificial Sequence
  Cyclic GFR-binding peptide
IGKTPKIVQVEKHQGQHPKIRVKAMKVSR

SEQ ID NO: 127694 - protein, 29 aa, Artificial Sequence
  Cyclic GFR-binding peptide
IGKTPKIVTAKKHQGQHPKIRIKRMQVPR

SEQ ID NO: 127695 - protein, 27 aa, Artificial Sequence
  Cyclic GFR-binding peptide
IGKTPKIVTAKKIKPTKGIIKRIQVPR

SEQ ID NO: 127696 - protein, 27 aa, Artificial Sequence
  Cyclic GFR-binding peptide
IGKTPKIVQVEKVKPKRGVVKAIKVSR

SEQ ID NO: 127697 - protein, 27 aa, Artificial Sequence
  Cyclic GFR-binding peptide
IGKTPKIVTAKKVKPKRGVIKRIQVPR

SEQ ID NO: 127698 - protein, 27 aa, Artificial Sequence
  Cyclic GFR-binding peptide
IGKTPKIVQVEKIKPTKGIVKAIKVSR

SEQ ID NO: 127699 - protein, 27 aa, Artificial Sequence
  Cyclic GFR-binding peptide
IGKTPKIVQVEKVKPTRGVVKAIKVSR

SEQ ID NO: 127700 - protein, 29 aa, Artificial Sequence
  Cyclic GFR-binding peptide
IGKTPKIVTAKKFIPKKRVIEIKRVQVPR

SEQ ID NO: 127701 - protein, 29 aa, Artificial Sequence
  Cyclic GFR-binding peptide
RPVQVRKIEYVRKKPKLKKATVIGKTPKI

SEQ ID NO: 127702 - protein, 29 aa, Artificial Sequence
  Cyclic GFR-binding peptide
RSVKVAKVEYVRKKPKLKEVQVIGKTPKI

SEQ ID NO: 127703 - protein, 27 aa, Artificial Sequence
  Cyclic GFR-binding peptide
RPVQIRKIVGRTPKVKKATVIGKTPKI

SEQ ID NO: 127704 - protein, 29 aa, Artificial Sequence
  Cyclic GFR-binding peptide
RSVKVAKVEIVRKKPIFKEVQVIGKTPKI

SEQ ID NO: 127705 - protein, 29 aa, Artificial Sequence
  Cyclic GFR-binding peptide
RSVKMAKVRIKPHQGQHKEVQVIGKTPKI

SEQ ID NO: 127706 - protein, 29 aa, Artificial Sequence
  Cyclic GFR-binding peptide
RPVQMRKIRIKPHQGQHKKATVIGKTPKI

SEQ ID NO: 127707 - protein, 27 aa, Artificial Sequence
  Cyclic GFR-binding peptide
RPVQIRKIIGKTPKIKKATVIGKTPKI

SEQ ID NO: 127708 - protein, 27 aa, Artificial Sequence
  Cyclic GFR-binding peptide
RSVKIAKVVGRKPKVKEVQVIGKTPKI

SEQ ID NO: 127709 - protein, 27 aa, Artificial Sequence
  Cyclic GFR-binding peptide
RPVQIRKIVGRKPKVKKATVIGKTPKI

SEQ ID NO: 127710 - protein, 27 aa, Artificial Sequence
  Cyclic GFR-binding peptide
RSVKIAKVIGKTPKIKEVQVIGKTPKI

SEQ ID NO: 127711 - protein, 27 aa, Artificial Sequence
  Cyclic GFR-binding peptide
RSVKIAKVVGRTPKVKEVQVIGKTPKI

SEQ ID NO: 127712 - protein, 29 aa, Artificial Sequence
  Cyclic GFR-binding peptide
RPVQVRKIEIVRKKPIFKKATVIGKTPKI

SEQ ID NO: 127713 - protein, 27 aa, Artificial Sequence
  Cyclic GFR-binding peptide
VGRTPKVRYKKLIKPTKGIFYLISIAN

SEQ ID NO: 127714 - protein, 29 aa, Artificial Sequence
  Cyclic GFR-binding peptide
VGRTPKVRHKRLFIPKKRVIEYYLVSTAS

SEQ ID NO: 127715 - protein, 27 aa, Artificial Sequence
  Cyclic GFR-binding peptide
VGRTPKVYHYKLVVKDYEDKYLMSIPS

SEQ ID NO: 127716 - protein, 27 aa, Artificial Sequence
  Cyclic GFR-binding peptide
VGRTPKVQYNKLIVNNSSDLYLVSIAS

SEQ ID NO: 127717 - protein, 27 aa, Artificial Sequence
  Cyclic GFR-binding peptide
VGRTPKVRYKKLVVKDYEDFYLMSIAN

SEQ ID NO: 127718 - protein, 27 aa, Artificial Sequence
  Cyclic GFR-binding peptide
VGRTPKVRYKKLVKPTRGVFYLISIAN

SEQ ID NO: 127719 - protein, 27 aa, Artificial Sequence
  Cyclic GFR-binding peptide
VGRTPKVRHKRLVVKENEDYYLMSTAS

SEQ ID NO: 127720 - protein, 27 aa, Artificial Sequence
  Cyclic GFR-binding peptide
VGRTPKVYHYKLIKPTKGIKYLISIPS

SEQ ID NO: 127721 - protein, 29 aa, Artificial Sequence
  Cyclic GFR-binding peptide
VGRTPKVRYKKLFIPKKRVIEFYLVSIAN

SEQ ID NO: 127722 - protein, 27 aa, Artificial Sequence
  Cyclic GFR-binding peptide
VGRTPKVYHYKLVVKENEDKYLMSIPS

SEQ ID NO: 127723 - protein, 27 aa, Artificial Sequence
  Cyclic GFR-binding peptide
VGRTPKVRHKRLVKPKRGVYYLISTAS

SEQ ID NO: 127724 - protein, 27 aa, Artificial Sequence
  Cyclic GFR-binding peptide
VGRTPKVYHYKLVKPKRGVKYLISIPS

SEQ ID NO: 127725 - protein, 29 aa, Artificial Sequence
  Cyclic GFR-binding peptide
VGRTPKVQYNKLFIPKKRVIELYLVSIAS

SEQ ID NO: 127726 - protein, 27 aa, Artificial Sequence
  Cyclic GFR-binding peptide
VGRTPKVQYNKLVKPTRGVLYLISIAS

SEQ ID NO: 127727 - protein, 27 aa, Artificial Sequence
  Cyclic GFR-binding peptide
VGRTPKVRYKKLVVKENEDFYLMSIAN

SEQ ID NO: 127728 - protein, 27 aa, Artificial Sequence
  Cyclic GFR-binding peptide
VGRTPKVQYNKLTPVGMDDLYLVSIAS

SEQ ID NO: 127729 - protein, 27 aa, Artificial Sequence
  Cyclic GFR-binding peptide
VGRTPKVRYKKLTPVGMDDFYLVSIAN

SEQ ID NO: 127730 - protein, 27 aa, Artificial Sequence
  Cyclic GFR-binding peptide
VGRTPKVRYKKLVKPKRGVFYLISIAN

SEQ ID NO: 127731 - protein, 27 aa, Artificial Sequence
  Cyclic GFR-binding peptide
VGRTPKVQYNKLVVKENEDLYLMSIAS

SEQ ID NO: 127732 - protein, 27 aa, Artificial Sequence
  Cyclic GFR-binding peptide
VGRTPKVYHYKLIVNSSDDKYLVSIPS

SEQ ID NO: 127733 - protein, 27 aa, Artificial Sequence
  Cyclic GFR-binding peptide
VGRTPKVQYNKLVKPKRGVLYLISIAS

SEQ ID NO: 127734 - protein, 27 aa, Artificial Sequence
  Cyclic GFR-binding peptide
VGRTPKVRYKKLIVNNSSDFYLVSIAN

SEQ ID NO: 127735 - protein, 27 aa, Artificial Sequence
  Cyclic GFR-binding peptide
VGRTPKVRYKKLIVNSSDDFYLVSIAN

SEQ ID NO: 127736 - protein, 27 aa, Artificial Sequence
  Cyclic GFR-binding peptide
VGRTPKVRHKRLVKPTRGVYYLISTAS

SEQ ID NO: 127737 - protein, 29 aa, Artificial Sequence
  Cyclic GFR-binding peptide
VGRTPKVYHYKLFIPKKRVIEKYLVSIPS

SEQ ID NO: 127738 - protein, 27 aa, Artificial Sequence
  Cyclic GFR-binding peptide
VGRTPKVRHKRLIKPTKGIYYLISTAS

SEQ ID NO: 127739 - protein, 27 aa, Artificial Sequence
  Cyclic GFR-binding peptide
VGRTPKVRHKRLTPVGMDDYYLVSTAS

SEQ ID NO: 127740 - protein, 27 aa, Artificial Sequence
  Cyclic GFR-binding peptide
VGRTPKVYHYKLTPVGMDDKYLVSIPS

SEQ ID NO: 127741 - protein, 27 aa, Artificial Sequence
  Cyclic GFR-binding peptide
VGRTPKVYHYKLIVNNSSDKYLVSIPS

SEQ ID NO: 127742 - protein, 27 aa, Artificial Sequence
  Cyclic GFR-binding peptide
VGRTPKVRHKRLIVNNSSDYYLVSTAS

SEQ ID NO: 127743 - protein, 27 aa, Artificial Sequence
  Cyclic GFR-binding peptide
VGRTPKVYHYKLVKPTRGVKYLISIPS

SEQ ID NO: 127744 - protein, 27 aa, Artificial Sequence
  Cyclic GFR-binding peptide
VGRTPKVRHKRLIVNSSDDYYLVSTAS

SEQ ID NO: 127745 - protein, 27 aa, Artificial Sequence
  Cyclic GFR-binding peptide
VGRTPKVRHKRLVVKDYEDYYLMSTAS

SEQ ID NO: 127746 - protein, 27 aa, Artificial Sequence
  Cyclic GFR-binding peptide
VGRTPKVQYNKLIKPTKGILYLISIAS

SEQ ID NO: 127747 - protein, 27 aa, Artificial Sequence
  Cyclic GFR-binding peptide
VGRTPKVQYNKLVVKDYEDLYLMSIAS

SEQ ID NO: 127748 - protein, 27 aa, Artificial Sequence
  Cyclic GFR-binding peptide
VGRTPKVQYNKLIVNSSDDLYLVSIAS

SEQ ID NO: 127749 - protein, 27 aa, Artificial Sequence
  Cyclic GFR-binding peptide
NAISILYFIGKTPKILKKYRVGRTPKV

SEQ ID NO: 127750 - protein, 29 aa, Artificial Sequence
  Cyclic GFR-binding peptide
SATSVLYYEIVRKKPIFLRKHRVGRTPKV

SEQ ID NO: 127751 - protein, 27 aa, Artificial Sequence
  Cyclic GFR-binding peptide
SPISMLYKDEYDKVVLKYHYVGRTPKV

SEQ ID NO: 127752 - protein, 27 aa, Artificial Sequence
  Cyclic GFR-binding peptide
SAISVLYLDSSNNVILKNYQVGRTPKV

SEQ ID NO: 127753 - protein, 27 aa, Artificial Sequence
  Cyclic GFR-binding peptide
NAISMLYFDEYDKVVLKKYRVGRTPKV

SEQ ID NO: 127754 - protein, 27 aa, Artificial Sequence
  Cyclic GFR-binding peptide
NAISILYFVGRTPKVLKKYRVGRTPKV

SEQ ID NO: 127755 - protein, 27 aa, Artificial Sequence
  Cyclic GFR-binding peptide
SATSMLYYDENEKVVLRKHRVGRTPKV

SEQ ID NO: 127756 - protein, 27 aa, Artificial Sequence
  Cyclic GFR-binding peptide
SPISILYKIGKTPKILKYHYVGRTPKV

SEQ ID NO: 127757 - protein, 29 aa, Artificial Sequence
  Cyclic GFR-binding peptide
NAISVLYFEIVRKKPIFLKKYRVGRTPKV

SEQ ID NO: 127758 - protein, 27 aa, Artificial Sequence
  Cyclic GFR-binding peptide
SPISMLYKDENEKVVLKYHYVGRTPKV

SEQ ID NO: 127759 - protein, 27 aa, Artificial Sequence
  Cyclic GFR-binding peptide
SATSILYYVGRKPKVLRKHRVGRTPKV

SEQ ID NO: 127760 - protein, 27 aa, Artificial Sequence
  Cyclic GFR-binding peptide
SPISILYKVGRKPKVLKYHYVGRTPKV

SEQ ID NO: 127761 - protein, 29 aa, Artificial Sequence
  Cyclic GFR-binding peptide
SAISVLYLEIVRKKPIFLKNYQVGRTPKV

SEQ ID NO: 127762 - protein, 27 aa, Artificial Sequence
  Cyclic GFR-binding peptide
SAISILYLVGRTPKVLKNYQVGRTPKV

SEQ ID NO: 127763 - protein, 27 aa, Artificial Sequence
  Cyclic GFR-binding peptide
NAISMLYFDENEKVVLKKYRVGRTPKV

SEQ ID NO: 127764 - protein, 27 aa, Artificial Sequence
  Cyclic GFR-binding peptide
SAISVLYLDDMGVPTLKNYQVGRTPKV

SEQ ID NO: 127765 - protein, 27 aa, Artificial Sequence
  Cyclic GFR-binding peptide
NAISVLYFDDMGVPTLKKYRVGRTPKV

SEQ ID NO: 127766 - protein, 27 aa, Artificial Sequence
  Cyclic GFR-binding peptide
NAISILYFVGRKPKVLKKYRVGRTPKV

SEQ ID NO: 127767 - protein, 27 aa, Artificial Sequence
  Cyclic GFR-binding peptide
SAISMLYLDENEKVVLKNYQVGRTPKV

SEQ ID NO: 127768 - protein, 27 aa, Artificial Sequence
  Cyclic GFR-binding peptide
SPISVLYKDDSSNVILKYHYVGRTPKV

SEQ ID NO: 127769 - protein, 27 aa, Artificial Sequence
  Cyclic GFR-binding peptide
SAISILYLVGRKPKVLKNYQVGRTPKV

SEQ ID NO: 127770 - protein, 27 aa, Artificial Sequence
  Cyclic GFR-binding peptide
NAISVLYFDSSNNVILKKYRVGRTPKV

SEQ ID NO: 127771 - protein, 27 aa, Artificial Sequence
  Cyclic GFR-binding peptide
NAISVLYFDDSSNVILKKYRVGRTPKV

SEQ ID NO: 127772 - protein, 27 aa, Artificial Sequence
  Cyclic GFR-binding peptide
SATSILYYVGRTPKVLRKHRVGRTPKV

SEQ ID NO: 127773 - protein, 29 aa, Artificial Sequence
  Cyclic GFR-binding peptide
SPISVLYKEIVRKKPIFLKYHYVGRTPKV

SEQ ID NO: 127774 - protein, 27 aa, Artificial Sequence
  Cyclic GFR-binding peptide
SATSILYYIGKTPKILRKHRVGRTPKV

SEQ ID NO: 127775 - protein, 27 aa, Artificial Sequence
  Cyclic GFR-binding peptide
SATSVLYYDDMGVPTLRKHRVGRTPKV

SEQ ID NO: 127776 - protein, 27 aa, Artificial Sequence
  Cyclic GFR-binding peptide
SPISVLYKDDMGVPTLKYHYVGRTPKV

SEQ ID NO: 127777 - protein, 27 aa, Artificial Sequence
  Cyclic GFR-binding peptide
SPISVLYKDSSNNVILKYHYVGRTPKV

SEQ ID NO: 127778 - protein, 27 aa, Artificial Sequence
  Cyclic GFR-binding peptide
SATSVLYYDSSNNVILRKHRVGRTPKV

SEQ ID NO: 127779 - protein, 27 aa, Artificial Sequence
  Cyclic GFR-binding peptide
SPISILYKVGRTPKVLKYHYVGRTPKV

SEQ ID NO: 127780 - protein, 27 aa, Artificial Sequence
  Cyclic GFR-binding peptide
SATSVLYYDDSSNVILRKHRVGRTPKV

SEQ ID NO: 127781 - protein, 27 aa, Artificial Sequence
  Cyclic GFR-binding peptide
SATSMLYYDEYDKVVLRKHRVGRTPKV

SEQ ID NO: 127782 - protein, 27 aa, Artificial Sequence
  Cyclic GFR-binding peptide
SAISILYLIGKTPKILKNYQVGRTPKV

SEQ ID NO: 127783 - protein, 27 aa, Artificial Sequence
  Cyclic GFR-binding peptide
SAISMLYLDEYDKVVLKNYQVGRTPKV

SEQ ID NO: 127784 - protein, 27 aa, Artificial Sequence
  Cyclic GFR-binding peptide
SAISVLYLDDSSNVILKNYQVGRTPKV

SEQ ID NO: 127785 - protein, 27 aa, Artificial Sequence
  Cyclic GFR-binding peptide
VGRTPKVRYKKLIKPTKGIFYLISIAN

SEQ ID NO: 127786 - protein, 27 aa, Artificial Sequence
  Cyclic GFR-binding peptide
VGRTPKVNSLQEVVKDYEDYYLMTLPE

SEQ ID NO: 127787 - protein, 27 aa, Artificial Sequence
  Cyclic GFR-binding peptide
VGRTPKVNSLQEIKPTKGIYYVIPLPE

SEQ ID NO: 127788 - protein, 27 aa, Artificial Sequence
  Cyclic GFR-binding peptide
VGRTPKVNSLQEVKPKRGVYYLITLPE

SEQ ID NO: 127789 - protein, 27 aa, Artificial Sequence
  Cyclic GFR-binding peptide
VGRTPKVNSLQEVKPTRGVYYVIPLPE

SEQ ID NO: 127790 - protein, 27 aa, Artificial Sequence
  Cyclic GFR-binding peptide
VGRTPKVRYKKLVVKDYEDFYLMSIAN

SEQ ID NO: 127791 - protein, 27 aa, Artificial Sequence
  Cyclic GFR-binding peptide
VGRTPKVEYQKYIVNSSDDIFLVSIPS

SEQ ID NO: 127792 - protein, 27 aa, Artificial Sequence
  Cyclic GFR-binding peptide
VGRTPKVEYQKYVKPTRGVIFLISIPS

SEQ ID NO: 127793 - protein, 27 aa, Artificial Sequence
  Cyclic GFR-binding peptide
VGRTPKVNSLQEVVKENEDYYLMTLPE

SEQ ID NO: 127794 - protein, 27 aa, Artificial Sequence
  Cyclic GFR-binding peptide
VGRTPKVRYKKLVKPTRGVFYLISIAN

SEQ ID NO: 127795 - protein, 27 aa, Artificial Sequence
  Cyclic GFR-binding peptide
VGRTPKVNSLQEVVNNASDYYLITLPE

SEQ ID NO: 127796 - protein, 27 aa, Artificial Sequence
  Cyclic GFR-binding peptide
VGRTPKVNSLQEVKPKRGVYYVIPLPE

SEQ ID NO: 127797 - protein, 27 aa, Artificial Sequence
  Cyclic GFR-binding peptide
VGRTPKVNSLQEVVNNASDYYVIPLPE

SEQ ID NO: 127798 - protein, 27 aa, Artificial Sequence
  Cyclic GFR-binding peptide
VGRTPKVNSLQEVKPTRGVYYLITLPE

SEQ ID NO: 127799 - protein, 27 aa, Artificial Sequence
  Cyclic GFR-binding peptide
VGRTPKVQYNKLVKPTRGVLYLISIAS

SEQ ID NO: 127800 - protein, 27 aa, Artificial Sequence
  Cyclic GFR-binding peptide
VGRTPKVRYKKLVVKENEDFYLMSIAN

SEQ ID NO: 127801 - protein, 27 aa, Artificial Sequence
  Cyclic GFR-binding peptide
VGRTPKVEYQKYIKPTKGIIFLISIPS

SEQ ID NO: 127802 - protein, 27 aa, Artificial Sequence
  Cyclic GFR-binding peptide
VGRTPKVEYQKYVVNNASDIFLISIPS

SEQ ID NO: 127803 - protein, 27 aa, Artificial Sequence
  Cyclic GFR-binding peptide
VGRTPKVRYKKLVKPKRGVFYLISIAN

SEQ ID NO: 127804 - protein, 27 aa, Artificial Sequence
  Cyclic GFR-binding peptide
VGRTPKVNSLQEIVNSSDDYYVVPLPE

SEQ ID NO: 127805 - protein, 27 aa, Artificial Sequence
  Cyclic GFR-binding peptide
VGRTPKVNSLQEVVKDYEDYYVMPLPE

SEQ ID NO: 127806 - protein, 27 aa, Artificial Sequence
  Cyclic GFR-binding peptide
VGRTPKVQYNKLVVKENEDLYLMSIAS

SEQ ID NO: 127807 - protein, 27 aa, Artificial Sequence
  Cyclic GFR-binding peptide
VGRTPKVEYQKYVVKENEDIFLMSIPS

SEQ ID NO: 127808 - protein, 27 aa, Artificial Sequence
  Cyclic GFR-binding peptide
VGRTPKVQYNKLVKPKRGVLYLISIAS

SEQ ID NO: 127809 - protein, 27 aa, Artificial Sequence
  Cyclic GFR-binding peptide
VGRTPKVRYKKLIVNSSDDFYLVSIAN

SEQ ID NO: 127810 - protein, 27 aa, Artificial Sequence
  Cyclic GFR-binding peptide
VGRTPKVNSLQEVVKENEDYYVMPLPE

SEQ ID NO: 127811 - protein, 27 aa, Artificial Sequence
  Cyclic GFR-binding peptide
VGRTPKVEYQKYVVKDYEDIFLMSIPS

SEQ ID NO: 127812 - protein, 27 aa, Artificial Sequence
  Cyclic GFR-binding peptide
VGRTPKVQYNKLVVNNASDLYLISIAS

SEQ ID NO: 127813 - protein, 27 aa, Artificial Sequence
  Cyclic GFR-binding peptide
VGRTPKVQYNKLIKPTKGILYLISIAS

SEQ ID NO: 127814 - protein, 27 aa, Artificial Sequence
  Cyclic GFR-binding peptide
VGRTPKVNSLQEIKPTKGIYYLITLPE

SEQ ID NO: 127815 - protein, 27 aa, Artificial Sequence
  Cyclic GFR-binding peptide
VGRTPKVEYQKYVKPKRGVIFLISIPS

SEQ ID NO: 127816 - protein, 27 aa, Artificial Sequence
  Cyclic GFR-binding peptide
VGRTPKVQYNKLVVKDYEDLYLMSIAS

SEQ ID NO: 127817 - protein, 27 aa, Artificial Sequence
  Cyclic GFR-binding peptide
VGRTPKVRYKKLVVNNASDFYLISIAN

SEQ ID NO: 127818 - protein, 27 aa, Artificial Sequence
  Cyclic GFR-binding peptide
VGRTPKVNSLQEIVNSSDDYYLVTLPE

SEQ ID NO: 127819 - protein, 27 aa, Artificial Sequence
  Cyclic GFR-binding peptide
VGRTPKVQYNKLIVNSSDDLYLVSIAS

SEQ ID NO: 127820 - protein, 27 aa, Artificial Sequence
  Cyclic GFR-binding peptide
NAISILYFIGKTPKILKKYRVGRTPKV

SEQ ID NO: 127821 - protein, 27 aa, Artificial Sequence
  Cyclic GFR-binding peptide
EPLTMLYYDEYDKVVEQLSNVGRTPKV

SEQ ID NO: 127822 - protein, 27 aa, Artificial Sequence
  Cyclic GFR-binding peptide
EPLPIVYYIGKTPKIEQLSNVGRTPKV

SEQ ID NO: 127823 - protein, 27 aa, Artificial Sequence
  Cyclic GFR-binding peptide
EPLTILYYVGRKPKVEQLSNVGRTPKV

SEQ ID NO: 127824 - protein, 27 aa, Artificial Sequence
  Cyclic GFR-binding peptide
EPLPIVYYVGRTPKVEQLSNVGRTPKV

SEQ ID NO: 127825 - protein, 27 aa, Artificial Sequence
  Cyclic GFR-binding peptide
NAISMLYFDEYDKVVLKKYRVGRTPKV

SEQ ID NO: 127826 - protein, 27 aa, Artificial Sequence
  Cyclic GFR-binding peptide
SPISVLFIDDSSNVIYKQYEVGRTPKV

SEQ ID NO: 127827 - protein, 27 aa, Artificial Sequence
  Cyclic GFR-binding peptide
SPISILFIVGRTPKVYKQYEVGRTPKV

SEQ ID NO: 127828 - protein, 27 aa, Artificial Sequence
  Cyclic GFR-binding peptide
EPLTMLYYDENEKVVEQLSNVGRTPKV

SEQ ID NO: 127829 - protein, 27 aa, Artificial Sequence
  Cyclic GFR-binding peptide
NAISILYFVGRTPKVLKKYRVGRTPKV

SEQ ID NO: 127830 - protein, 27 aa, Artificial Sequence
  Cyclic GFR-binding peptide
EPLTILYYDSANNVVEQLSNVGRTPKV

SEQ ID NO: 127831 - protein, 27 aa, Artificial Sequence
  Cyclic GFR-binding peptide
EPLPIVYYVGRKPKVEQLSNVGRTPKV

SEQ ID NO: 127832 - protein, 27 aa, Artificial Sequence
  Cyclic GFR-binding peptide
EPLPIVYYDSANNVVEQLSNVGRTPKV

SEQ ID NO: 127833 - protein, 27 aa, Artificial Sequence
  Cyclic GFR-binding peptide
EPLTILYYVGRTPKVEQLSNVGRTPKV

SEQ ID NO: 127834 - protein, 27 aa, Artificial Sequence
  Cyclic GFR-binding peptide
SAISILYLVGRTPKVLKNYQVGRTPKV

SEQ ID NO: 127835 - protein, 27 aa, Artificial Sequence
  Cyclic GFR-binding peptide
NAISMLYFDENEKVVLKKYRVGRTPKV

SEQ ID NO: 127836 - protein, 27 aa, Artificial Sequence
  Cyclic GFR-binding peptide
SPISILFIIGKTPKIYKQYEVGRTPKV

SEQ ID NO: 127837 - protein, 27 aa, Artificial Sequence
  Cyclic GFR-binding peptide
SPISILFIDSANNVVYKQYEVGRTPKV

SEQ ID NO: 127838 - protein, 27 aa, Artificial Sequence
  Cyclic GFR-binding peptide
NAISILYFVGRKPKVLKKYRVGRTPKV

SEQ ID NO: 127839 - protein, 27 aa, Artificial Sequence
  Cyclic GFR-binding peptide
EPLPVVYYDDSSNVIEQLSNVGRTPKV

SEQ ID NO: 127840 - protein, 27 aa, Artificial Sequence
  Cyclic GFR-binding peptide
EPLPMVYYDEYDKVVEQLSNVGRTPKV

SEQ ID NO: 127841 - protein, 27 aa, Artificial Sequence
  Cyclic GFR-binding peptide
SAISMLYLDENEKVVLKNYQVGRTPKV

SEQ ID NO: 127842 - protein, 27 aa, Artificial Sequence
  Cyclic GFR-binding peptide
SPISMLFIDENEKVVYKQYEVGRTPKV

SEQ ID NO: 127843 - protein, 27 aa, Artificial Sequence
  Cyclic GFR-binding peptide
SAISILYLVGRKPKVLKNYQVGRTPKV

SEQ ID NO: 127844 - protein, 27 aa, Artificial Sequence
  Cyclic GFR-binding peptide
NAISVLYFDDSSNVILKKYRVGRTPKV

SEQ ID NO: 127845 - protein, 27 aa, Artificial Sequence
  Cyclic GFR-binding peptide
EPLPMVYYDENEKVVEQLSNVGRTPKV

SEQ ID NO: 127846 - protein, 27 aa, Artificial Sequence
  Cyclic GFR-binding peptide
SPISMLFIDEYDKVVYKQYEVGRTPKV

SEQ ID NO: 127847 - protein, 27 aa, Artificial Sequence
  Cyclic GFR-binding peptide
SAISILYLDSANNVVLKNYQVGRTPKV

SEQ ID NO: 127848 - protein, 27 aa, Artificial Sequence
  Cyclic GFR-binding peptide
SAISILYLIGKTPKILKNYQVGRTPKV

SEQ ID NO: 127849 - protein, 27 aa, Artificial Sequence
  Cyclic GFR-binding peptide
EPLTILYYIGKTPKIEQLSNVGRTPKV

SEQ ID NO: 127850 - protein, 27 aa, Artificial Sequence
  Cyclic GFR-binding peptide
SPISILFIVGRKPKVYKQYEVGRTPKV

SEQ ID NO: 127851 - protein, 27 aa, Artificial Sequence
  Cyclic GFR-binding peptide
SAISMLYLDEYDKVVLKNYQVGRTPKV

SEQ ID NO: 127852 - protein, 27 aa, Artificial Sequence
  Cyclic GFR-binding peptide
NAISILYFDSANNVVLKKYRVGRTPKV

SEQ ID NO: 127853 - protein, 27 aa, Artificial Sequence
  Cyclic GFR-binding peptide
EPLTVLYYDDSSNVIEQLSNVGRTPKV

SEQ ID NO: 127854 - protein, 27 aa, Artificial Sequence
  Cyclic GFR-binding peptide
SAISVLYLDDSSNVILKNYQVGRTPKV

SEQ ID NO: 127855 - protein, 29 aa, Artificial Sequence
  Cyclic GFR-binding peptide
VGRTPKVVTAKKLKPKKRVYEIKRVQVPR

SEQ ID NO: 127856 - protein, 29 aa, Artificial Sequence
  Cyclic GFR-binding peptide
VGRTPKVVQVEKLKPKKRVYEVKAVKVSR

SEQ ID NO: 127857 - protein, 29 aa, Artificial Sequence
  Cyclic GFR-binding peptide
VGRTPKVVQVEKFIPKKRVIEVKAVKVSR

SEQ ID NO: 127858 - protein, 29 aa, Artificial Sequence
  Cyclic GFR-binding peptide
VGRTPKVVQVEKHQGQHPKIRVKAMKVSR

SEQ ID NO: 127859 - protein, 29 aa, Artificial Sequence
  Cyclic GFR-binding peptide
VGRTPKVVTAKKHQGQHPKIRIKRMQVPR

SEQ ID NO: 127860 - protein, 29 aa, Artificial Sequence
  Cyclic GFR-binding peptide
VGRTPKVSMEGLLKPKKRVYEMIQVTINS

SEQ ID NO: 127861 - protein, 29 aa, Artificial Sequence
  Cyclic GFR-binding peptide
VGRTPKVSMEGIFIPKKRVIEMIQVTINS

SEQ ID NO: 127862 - protein, 29 aa, Artificial Sequence
  Cyclic GFR-binding peptide
VGRTPKVSMEGLHQGQHPKIRMIQMTINS

SEQ ID NO: 127863 - protein, 29 aa, Artificial Sequence
  Cyclic GFR-binding peptide
VGRTPKVSMEGILKPKKRVYEMIQVTINS

SEQ ID NO: 127864 - protein, 29 aa, Artificial Sequence
  Cyclic GFR-binding peptide
VGRTPKVSMEGLFIPKKRVIEMIQVTINS

SEQ ID NO: 127865 - protein, 29 aa, Artificial Sequence
  Cyclic GFR-binding peptide
VGRTPKVVTAKKFIPKKRVIEIKRVQVPR

SEQ ID NO: 127866 - protein, 29 aa, Artificial Sequence
  Cyclic GFR-binding peptide
VGRTPKVSMEGIHQGQHPKIRMIQMTINS

SEQ ID NO: 127867 - protein, 29 aa, Artificial Sequence
  Cyclic GFR-binding peptide
RPVQVRKIEYVRKKPKLKKATVVGRTPKV

SEQ ID NO: 127868 - protein, 29 aa, Artificial Sequence
  Cyclic GFR-binding peptide
RSVKVAKVEYVRKKPKLKEVQVVGRTPKV

SEQ ID NO: 127869 - protein, 29 aa, Artificial Sequence
  Cyclic GFR-binding peptide
RSVKVAKVEIVRKKPIFKEVQVVGRTPKV

SEQ ID NO: 127870 - protein, 29 aa, Artificial Sequence
  Cyclic GFR-binding peptide
RSVKMAKVRIKPHQGQHKEVQVVGRTPKV

SEQ ID NO: 127871 - protein, 29 aa, Artificial Sequence
  Cyclic GFR-binding peptide
RPVQMRKIRIKPHQGQHKKATVVGRTPKV

SEQ ID NO: 127872 - protein, 29 aa, Artificial Sequence
  Cyclic GFR-binding peptide
SNITVQIMEYVRKKPKLLGEMSVGRTPKV

SEQ ID NO: 127873 - protein, 29 aa, Artificial Sequence
  Cyclic GFR-binding peptide
SNITVQIMEIVRKKPIFIGEMSVGRTPKV

SEQ ID NO: 127874 - protein, 29 aa, Artificial Sequence
  Cyclic GFR-binding peptide
SNITMQIMRIKPHQGQHLGEMSVGRTPKV

SEQ ID NO: 127875 - protein, 29 aa, Artificial Sequence
  Cyclic GFR-binding peptide
SNITVQIMEYVRKKPKLIGEMSVGRTPKV

SEQ ID NO: 127876 - protein, 29 aa, Artificial Sequence
  Cyclic GFR-binding peptide
SNITVQIMEIVRKKPIFLGEMSVGRTPKV

SEQ ID NO: 127877 - protein, 29 aa, Artificial Sequence
  Cyclic GFR-binding peptide
RPVQVRKIEIVRKKPIFKKATVVGRTPKV

SEQ ID NO: 127878 - protein, 29 aa, Artificial Sequence
  Cyclic GFR-binding peptide
SNITMQIMRIKPHQGQHIGEMSVGRTPKV

SEQ ID NO: 127879 - protein, 29 aa, Artificial Sequence
  Cyclic GFR-binding peptide
VGRTPKVVTAKKLKPKKRVYEIKRVQVPR

SEQ ID NO: 127880 - protein, 29 aa, Artificial Sequence
  Cyclic GFR-binding peptide
VGRTPKVVQVEKLKPKKRVYEVKAVKVSR

SEQ ID NO: 127881 - protein, 29 aa, Artificial Sequence
  Cyclic GFR-binding peptide
VGRTPKVVQVEKFIPKKRVIEVKAVKVSR

SEQ ID NO: 127882 - protein, 29 aa, Artificial Sequence
  Cyclic GFR-binding peptide
VGRTPKVVQVEKHQGQHPKIRVKAMKVSR

SEQ ID NO: 127883 - protein, 29 aa, Artificial Sequence
  Cyclic GFR-binding peptide
VGRTPKVVTAKKHQGQHPKIRIKRMQVPR

SEQ ID NO: 127884 - protein, 29 aa, Artificial Sequence
  Cyclic GFR-binding peptide
VGRTPKVSMEGLLKPKKRVYEMIQVTINS

SEQ ID NO: 127885 - protein, 29 aa, Artificial Sequence
  Cyclic GFR-binding peptide
VGRTPKVSMEGIFIPKKRVIEMIQVTINS

SEQ ID NO: 127886 - protein, 29 aa, Artificial Sequence
  Cyclic GFR-binding peptide
VGRTPKVSMEGLHQGQHPKIRMIQMTINS

SEQ ID NO: 127887 - protein, 29 aa, Artificial Sequence
  Cyclic GFR-binding peptide
VGRTPKVSMEGILKPKKRVYEMIQVTINS

SEQ ID NO: 127888 - protein, 29 aa, Artificial Sequence
  Cyclic GFR-binding peptide
VGRTPKVSMEGLFIPKKRVIEMIQVTINS

SEQ ID NO: 127889 - protein, 29 aa, Artificial Sequence
  Cyclic GFR-binding peptide
VGRTPKVVTAKKFIPKKRVIEIKRVQVPR

SEQ ID NO: 127890 - protein, 29 aa, Artificial Sequence
  Cyclic GFR-binding peptide
VGRTPKVSMEGIHQGQHPKIRMIQMTINS

SEQ ID NO: 127891 - protein, 29 aa, Artificial Sequence
  Cyclic GFR-binding peptide
RPVQVRKIEYVRKKPKLKKATVVGRTPKV

SEQ ID NO: 127892 - protein, 29 aa, Artificial Sequence
  Cyclic GFR-binding peptide
RSVKVAKVEYVRKKPKLKEVQVVGRTPKV

SEQ ID NO: 127893 - protein, 29 aa, Artificial Sequence
  Cyclic GFR-binding peptide
RSVKVAKVEIVRKKPIFKEVQVVGRTPKV

SEQ ID NO: 127894 - protein, 29 aa, Artificial Sequence
  Cyclic GFR-binding peptide
RSVKMAKVRIKPHQGQHKEVQVVGRTPKV

SEQ ID NO: 127895 - protein, 29 aa, Artificial Sequence
  Cyclic GFR-binding peptide
RPVQMRKIRIKPHQGQHKKATVVGRTPKV

SEQ ID NO: 127896 - protein, 29 aa, Artificial Sequence
  Cyclic GFR-binding peptide
SNITVQIMEYVRKKPKLLGEMSVGRTPKV

SEQ ID NO: 127897 - protein, 29 aa, Artificial Sequence
  Cyclic GFR-binding peptide
SNITVQIMEIVRKKPIFIGEMSVGRTPKV

SEQ ID NO: 127898 - protein, 29 aa, Artificial Sequence
  Cyclic GFR-binding peptide
SNITMQIMRIKPHQGQHLGEMSVGRTPKV

SEQ ID NO: 127899 - protein, 29 aa, Artificial Sequence
  Cyclic GFR-binding peptide
SNITVQIMEYVRKKPKLIGEMSVGRTPKV

SEQ ID NO: 127900 - protein, 29 aa, Artificial Sequence
  Cyclic GFR-binding peptide
SNITVQIMEIVRKKPIFLGEMSVGRTPKV

SEQ ID NO: 127901 - protein, 29 aa, Artificial Sequence
  Cyclic GFR-binding peptide
RPVQVRKIEIVRKKPIFKKATVVGRTPKV

SEQ ID NO: 127902 - protein, 29 aa, Artificial Sequence
  Cyclic GFR-binding peptide
SNITMQIMRIKPHQGQHIGEMSVGRTPKV

SEQ ID NO: 127903 - protein, 27 aa, Artificial Sequence
  Cyclic GFR-binding peptide
VGRTPKVEYQKYVVKENEDIYLMSIPS

SEQ ID NO: 127904 - protein, 27 aa, Artificial Sequence
  Cyclic GFR-binding peptide
VGRTPKVRYKKLIKPTKGIFYLISIAN

SEQ ID NO: 127905 - protein, 27 aa, Artificial Sequence
  Cyclic GFR-binding peptide
VGRTPKVEYKFKVKPTRGVLYLISIPE

SEQ ID NO: 127906 - protein, 27 aa, Artificial Sequence
  Cyclic GFR-binding peptide
VGRTPKVYHYKLVVKDYEDKYLMSIPS

SEQ ID NO: 127907 - protein, 27 aa, Artificial Sequence
  Cyclic GFR-binding peptide
VGRTPKVEYKFKTPVGMDDLYLVSIPE

SEQ ID NO: 127908 - protein, 27 aa, Artificial Sequence
  Cyclic GFR-binding peptide
VGRTPKVEYQKYVKPKRGVIYLISIPS

SEQ ID NO: 127909 - protein, 27 aa, Artificial Sequence
  Cyclic GFR-binding peptide
VGRTPKVRYKKLVVKDYEDFYLMSIAN

SEQ ID NO: 127910 - protein, 27 aa, Artificial Sequence
  Cyclic GFR-binding peptide
VGRTPKVEYQKYVVKDYEDIYLMSIPS

SEQ ID NO: 127911 - protein, 27 aa, Artificial Sequence
  Cyclic GFR-binding peptide
VGRTPKVRYKKLVKPTRGVFYLISIAN

SEQ ID NO: 127912 - protein, 27 aa, Artificial Sequence
  Cyclic GFR-binding peptide
VGRTPKVYHYKLIKPTKGIKYLISIPS

SEQ ID NO: 127913 - protein, 27 aa, Artificial Sequence
  Cyclic GFR-binding peptide
VGRTPKVYHYKLVVKENEDKYLMSIPS

SEQ ID NO: 127914 - protein, 27 aa, Artificial Sequence
  Cyclic GFR-binding peptide
VGRTPKVYHYKLVKPKRGVKYLISIPS

SEQ ID NO: 127915 - protein, 27 aa, Artificial Sequence
  Cyclic GFR-binding peptide
VGRTPKVEYKFKIKPTKGILYLISIPE

SEQ ID NO: 127916 - protein, 27 aa, Artificial Sequence
  Cyclic GFR-binding peptide
VGRTPKVEYQKYIKPTKGIIYLISIPS

SEQ ID NO: 127917 - protein, 27 aa, Artificial Sequence
  Cyclic GFR-binding peptide
VGRTPKVRYKKLVVKENEDFYLMSIAN

SEQ ID NO: 127918 - protein, 27 aa, Artificial Sequence
  Cyclic GFR-binding peptide
VGRTPKVRYKKLVVNNAADFYLISIAN

SEQ ID NO: 127919 - protein, 27 aa, Artificial Sequence
  Cyclic GFR-binding peptide
VGRTPKVYHYKLYTVVGKDKYLISIPS

SEQ ID NO: 127920 - protein, 27 aa, Artificial Sequence
  Cyclic GFR-binding peptide
VGRTPKVRYKKLTPVGMDDFYLVSIAN

SEQ ID NO: 127921 - protein, 27 aa, Artificial Sequence
  Cyclic GFR-binding peptide
VGRTPKVRYKKLVKPKRGVFYLISIAN

SEQ ID NO: 127922 - protein, 27 aa, Artificial Sequence
  Cyclic GFR-binding peptide
VGRTPKVYHYKLVVNNAADKYLISIPS

SEQ ID NO: 127923 - protein, 27 aa, Artificial Sequence
  Cyclic GFR-binding peptide
VGRTPKVYHYKLIVNSSDDKYLVSIPS

SEQ ID NO: 127924 - protein, 27 aa, Artificial Sequence
  Cyclic GFR-binding peptide
VGRTPKVRYKKLIVNNSSDFYLVSIAN

SEQ ID NO: 127925 - protein, 27 aa, Artificial Sequence
  Cyclic GFR-binding peptide
VGRTPKVRYKKLYTVVGKDFYLISIAN

SEQ ID NO: 127926 - protein, 27 aa, Artificial Sequence
  Cyclic GFR-binding peptide
VGRTPKVEYQKYVVNNAADIYLISIPS

SEQ ID NO: 127927 - protein, 27 aa, Artificial Sequence
  Cyclic GFR-binding peptide
VGRTPKVRYKKLIVNSSDDFYLVSIAN

SEQ ID NO: 127928 - protein, 27 aa, Artificial Sequence
  Cyclic GFR-binding peptide
VGRTPKVEYKFKIVNNSSDLYLVSIPE

SEQ ID NO: 127929 - protein, 27 aa, Artificial Sequence
  Cyclic GFR-binding peptide
VGRTPKVEYQKYVKPTRGVIYLISIPS

SEQ ID NO: 127930 - protein, 27 aa, Artificial Sequence
  Cyclic GFR-binding peptide
VGRTPKVEYQKYIVNSSDDIYLVSIPS

SEQ ID NO: 127931 - protein, 27 aa, Artificial Sequence
  Cyclic GFR-binding peptide
VGRTPKVYHYKLTPVGMDDKYLVSIPS

SEQ ID NO: 127932 - protein, 27 aa, Artificial Sequence
  Cyclic GFR-binding peptide
VGRTPKVYHYKLIVNNSSDKYLVSIPS

SEQ ID NO: 127933 - protein, 27 aa, Artificial Sequence
  Cyclic GFR-binding peptide
VGRTPKVEYKFKIVNSSDDLYLVSIPE

SEQ ID NO: 127934 - protein, 27 aa, Artificial Sequence
  Cyclic GFR-binding peptide
VGRTPKVYHYKLVKPTRGVKYLISIPS

SEQ ID NO: 127935 - protein, 27 aa, Artificial Sequence
  Cyclic GFR-binding peptide
VGRTPKVEYKFKVKPKRGVLYLISIPE

SEQ ID NO: 127936 - protein, 27 aa, Artificial Sequence
  Cyclic GFR-binding peptide
VGRTPKVEYQKYYTVVGKDIYLISIPS

SEQ ID NO: 127937 - protein, 27 aa, Artificial Sequence
  Cyclic GFR-binding peptide
VGRTPKVEYKFKVVKENEDLYLMSIPE

SEQ ID NO: 127938 - protein, 27 aa, Artificial Sequence
  Cyclic GFR-binding peptide
VGRTPKVEYQKYTPVGMDDIYLVSIPS

SEQ ID NO: 127939 - protein, 27 aa, Artificial Sequence
  Cyclic GFR-binding peptide
VGRTPKVEYQKYIVNNSSDIYLVSIPS

SEQ ID NO: 127940 - protein, 27 aa, Artificial Sequence
  Cyclic GFR-binding peptide
VGRTPKVEYKFKVVKDYEDLYLMSIPE

SEQ ID NO: 127941 - protein, 27 aa, Artificial Sequence
  Cyclic GFR-binding peptide
VGRTPKVEYKFKYTVVGKDLYLISIPE

SEQ ID NO: 127942 - protein, 27 aa, Artificial Sequence
  Cyclic GFR-binding peptide
VGRTPKVEYKFKVVNNAADLYLISIPE

SEQ ID NO: 127943 - protein, 27 aa, Artificial Sequence
  Cyclic GFR-binding peptide
SPISMLYIDENEKVVYKQYEVGRTPKV

SEQ ID NO: 127944 - protein, 27 aa, Artificial Sequence
  Cyclic GFR-binding peptide
NAISILYFIGKTPKILKKYRVGRTPKV

SEQ ID NO: 127945 - protein, 27 aa, Artificial Sequence
  Cyclic GFR-binding peptide
EPISILYLVGRTPKVKFKYEVGRTPKV

SEQ ID NO: 127946 - protein, 27 aa, Artificial Sequence
  Cyclic GFR-binding peptide
SPISMLYKDEYDKVVLKYHYVGRTPKV

SEQ ID NO: 127947 - protein, 27 aa, Artificial Sequence
  Cyclic GFR-binding peptide
EPISVLYLDDMGVPTKFKYEVGRTPKV

SEQ ID NO: 127948 - protein, 27 aa, Artificial Sequence
  Cyclic GFR-binding peptide
SPISILYIVGRKPKVYKQYEVGRTPKV

SEQ ID NO: 127949 - protein, 27 aa, Artificial Sequence
  Cyclic GFR-binding peptide
NAISMLYFDEYDKVVLKKYRVGRTPKV

SEQ ID NO: 127950 - protein, 27 aa, Artificial Sequence
  Cyclic GFR-binding peptide
SPISMLYIDEYDKVVYKQYEVGRTPKV

SEQ ID NO: 127951 - protein, 27 aa, Artificial Sequence
  Cyclic GFR-binding peptide
NAISILYFVGRTPKVLKKYRVGRTPKV

SEQ ID NO: 127952 - protein, 27 aa, Artificial Sequence
  Cyclic GFR-binding peptide
SPISILYKIGKTPKILKYHYVGRTPKV

SEQ ID NO: 127953 - protein, 27 aa, Artificial Sequence
  Cyclic GFR-binding peptide
SPISMLYKDENEKVVLKYHYVGRTPKV

SEQ ID NO: 127954 - protein, 27 aa, Artificial Sequence
  Cyclic GFR-binding peptide
SPISILYKVGRKPKVLKYHYVGRTPKV

SEQ ID NO: 127955 - protein, 27 aa, Artificial Sequence
  Cyclic GFR-binding peptide
EPISILYLIGKTPKIKFKYEVGRTPKV

SEQ ID NO: 127956 - protein, 27 aa, Artificial Sequence
  Cyclic GFR-binding peptide
SPISILYIIGKTPKIYKQYEVGRTPKV

SEQ ID NO: 127957 - protein, 27 aa, Artificial Sequence
  Cyclic GFR-binding peptide
NAISMLYFDENEKVVLKKYRVGRTPKV

SEQ ID NO: 127958 - protein, 27 aa, Artificial Sequence
  Cyclic GFR-binding peptide
NAISILYFDAANNVVLKKYRVGRTPKV

SEQ ID NO: 127959 - protein, 27 aa, Artificial Sequence
  Cyclic GFR-binding peptide
SPISILYKDKGVVTYLKYHYVGRTPKV

SEQ ID NO: 127960 - protein, 27 aa, Artificial Sequence
  Cyclic GFR-binding peptide
NAISVLYFDDMGVPTLKKYRVGRTPKV

SEQ ID NO: 127961 - protein, 27 aa, Artificial Sequence
  Cyclic GFR-binding peptide
NAISILYFVGRKPKVLKKYRVGRTPKV

SEQ ID NO: 127962 - protein, 27 aa, Artificial Sequence
  Cyclic GFR-binding peptide
SPISILYKDAANNVVLKYHYVGRTPKV

SEQ ID NO: 127963 - protein, 27 aa, Artificial Sequence
  Cyclic GFR-binding peptide
SPISVLYKDDSSNVILKYHYVGRTPKV

SEQ ID NO: 127964 - protein, 27 aa, Artificial Sequence
  Cyclic GFR-binding peptide
NAISVLYFDSSNNVILKKYRVGRTPKV

SEQ ID NO: 127965 - protein, 27 aa, Artificial Sequence
  Cyclic GFR-binding peptide
NAISILYFDKGVVTYLKKYRVGRTPKV

SEQ ID NO: 127966 - protein, 27 aa, Artificial Sequence
  Cyclic GFR-binding peptide
SPISILYIDAANNVVYKQYEVGRTPKV

SEQ ID NO: 127967 - protein, 27 aa, Artificial Sequence
  Cyclic GFR-binding peptide
NAISVLYFDDSSNVILKKYRVGRTPKV

SEQ ID NO: 127968 - protein, 27 aa, Artificial Sequence
  Cyclic GFR-binding peptide
EPISVLYLDSSNNVIKFKYEVGRTPKV

SEQ ID NO: 127969 - protein, 27 aa, Artificial Sequence
  Cyclic GFR-binding peptide
SPISILYIVGRTPKVYKQYEVGRTPKV

SEQ ID NO: 127970 - protein, 27 aa, Artificial Sequence
  Cyclic GFR-binding peptide
SPISVLYIDDSSNVIYKQYEVGRTPKV

SEQ ID NO: 127971 - protein, 27 aa, Artificial Sequence
  Cyclic GFR-binding peptide
SPISVLYKDDMGVPTLKYHYVGRTPKV

SEQ ID NO: 127972 - protein, 27 aa, Artificial Sequence
  Cyclic GFR-binding peptide
SPISVLYKDSSNNVILKYHYVGRTPKV

SEQ ID NO: 127973 - protein, 27 aa, Artificial Sequence
  Cyclic GFR-binding peptide
EPISVLYLDDSSNVIKFKYEVGRTPKV

SEQ ID NO: 127974 - protein, 27 aa, Artificial Sequence
  Cyclic GFR-binding peptide
SPISILYKVGRTPKVLKYHYVGRTPKV

SEQ ID NO: 127975 - protein, 27 aa, Artificial Sequence
  Cyclic GFR-binding peptide
EPISILYLVGRKPKVKFKYEVGRTPKV

SEQ ID NO: 127976 - protein, 27 aa, Artificial Sequence
  Cyclic GFR-binding peptide
SPISILYIDKGVVTYYKQYEVGRTPKV

SEQ ID NO: 127977 - protein, 27 aa, Artificial Sequence
  Cyclic GFR-binding peptide
EPISMLYLDENEKVVKFKYEVGRTPKV

SEQ ID NO: 127978 - protein, 27 aa, Artificial Sequence
  Cyclic GFR-binding peptide
SPISVLYIDDMGVPTYKQYEVGRTPKV

SEQ ID NO: 127979 - protein, 27 aa, Artificial Sequence
  Cyclic GFR-binding peptide
SPISVLYIDSSNNVIYKQYEVGRTPKV

SEQ ID NO: 127980 - protein, 27 aa, Artificial Sequence
  Cyclic GFR-binding peptide
EPISMLYLDEYDKVVKFKYEVGRTPKV

SEQ ID NO: 127981 - protein, 27 aa, Artificial Sequence
  Cyclic GFR-binding peptide
EPISILYLDKGVVTYKFKYEVGRTPKV

SEQ ID NO: 127982 - protein, 27 aa, Artificial Sequence
  Cyclic GFR-binding peptide
EPISILYLDAANNVVKFKYEVGRTPKV

SEQ ID NO: 127983 - protein, 27 aa, Artificial Sequence
  Cyclic GFR-binding peptide
VGRTPKVPIKGYIIQQKDNFYLMNIPS

SEQ ID NO: 127984 - protein, 27 aa, Artificial Sequence
  Cyclic GFR-binding peptide
VGRTPKVPIKGYVVKDYEDFYLMNIPS

SEQ ID NO: 127985 - protein, 27 aa, Artificial Sequence
  Cyclic GFR-binding peptide
VGRTPKVPIKGYIVNSSDDFYLVNIPS

SEQ ID NO: 127986 - protein, 27 aa, Artificial Sequence
  Cyclic GFR-binding peptide
VGRTPKVPIKGYLLVRGNDFYLMNIPS

SEQ ID NO: 127987 - protein, 27 aa, Artificial Sequence
  Cyclic GFR-binding peptide
VGRTPKVPIKGYVVNNAADFYLINIPS

SEQ ID NO: 127988 - protein, 27 aa, Artificial Sequence
  Cyclic GFR-binding peptide
VGRTPKVPIKGYVVKENEDFYLMNIPS

SEQ ID NO: 127989 - protein, 27 aa, Artificial Sequence
  Cyclic GFR-binding peptide
VGRTPKVPIKGYVVNNASDFYLINIPS

SEQ ID NO: 127990 - protein, 27 aa, Artificial Sequence
  Cyclic GFR-binding peptide
VGRTPKVPIKGYYTVVGKDFYLINIPS

SEQ ID NO: 127991 - protein, 27 aa, Artificial Sequence
  Cyclic GFR-binding peptide
VGRTPKVPIKGYTPVGMDDFYLVNIPS

SEQ ID NO: 127992 - protein, 27 aa, Artificial Sequence
  Cyclic GFR-binding peptide
VGRTPKVPIKGYIVNNSSDFYLVNIPS

SEQ ID NO: 127993 - protein, 27 aa, Artificial Sequence
  Cyclic GFR-binding peptide
SPINMLYFNDKQQIIYGKIPVGRTPKV

SEQ ID NO: 127994 - protein, 27 aa, Artificial Sequence
  Cyclic GFR-binding peptide
SPINMLYFDEYDKVVYGKIPVGRTPKV

SEQ ID NO: 127995 - protein, 27 aa, Artificial Sequence
  Cyclic GFR-binding peptide
SPINVLYFDDSSNVIYGKIPVGRTPKV

SEQ ID NO: 127996 - protein, 27 aa, Artificial Sequence
  Cyclic GFR-binding peptide
SPINMLYFDNGRVLLYGKIPVGRTPKV

SEQ ID NO: 127997 - protein, 27 aa, Artificial Sequence
  Cyclic GFR-binding peptide
SPINILYFDAANNVVYGKIPVGRTPKV

SEQ ID NO: 127998 - protein, 27 aa, Artificial Sequence
  Cyclic GFR-binding peptide
SPINMLYFDENEKVVYGKIPVGRTPKV

SEQ ID NO: 127999 - protein, 27 aa, Artificial Sequence
  Cyclic GFR-binding peptide
SPINILYFDSANNVVYGKIPVGRTPKV

SEQ ID NO: 128000 - protein, 27 aa, Artificial Sequence
  Cyclic GFR-binding peptide
SPINILYFDKGVVTYYGKIPVGRTPKV

SEQ ID NO: 128001 - protein, 27 aa, Artificial Sequence
  Cyclic GFR-binding peptide
SPINVLYFDDMGVPTYGKIPVGRTPKV

SEQ ID NO: 128002 - protein, 27 aa, Artificial Sequence
  Cyclic GFR-binding peptide
SPINVLYFDSSNNVIYGKIPVGRTPKV

SEQ ID NO: 128003 - protein, 27 aa, Artificial Sequence
  Cyclic GFR-binding peptide
VGRTPKVPIKGYIIQQKDNFYLMNIPS

SEQ ID NO: 128004 - protein, 27 aa, Artificial Sequence
  Cyclic GFR-binding peptide
VGRTPKVPIKGYVVKDYEDFYLMNIPS

SEQ ID NO: 128005 - protein, 27 aa, Artificial Sequence
  Cyclic GFR-binding peptide
VGRTPKVPIKGYIVNSSDDFYLVNIPS

SEQ ID NO: 128006 - protein, 27 aa, Artificial Sequence
  Cyclic GFR-binding peptide
VGRTPKVPIKGYLLVRGNDFYLMNIPS

SEQ ID NO: 128007 - protein, 27 aa, Artificial Sequence
  Cyclic GFR-binding peptide
VGRTPKVPIKGYVVNNAADFYLINIPS

SEQ ID NO: 128008 - protein, 27 aa, Artificial Sequence
  Cyclic GFR-binding peptide
VGRTPKVPIKGYVVKENEDFYLMNIPS

SEQ ID NO: 128009 - protein, 27 aa, Artificial Sequence
  Cyclic GFR-binding peptide
VGRTPKVPIKGYVVNNASDFYLINIPS

SEQ ID NO: 128010 - protein, 27 aa, Artificial Sequence
  Cyclic GFR-binding peptide
VGRTPKVPIKGYYTVVGKDFYLINIPS

SEQ ID NO: 128011 - protein, 27 aa, Artificial Sequence
  Cyclic GFR-binding peptide
VGRTPKVPIKGYTPVGMDDFYLVNIPS

SEQ ID NO: 128012 - protein, 27 aa, Artificial Sequence
  Cyclic GFR-binding peptide
VGRTPKVPIKGYIVNNSSDFYLVNIPS

SEQ ID NO: 128013 - protein, 27 aa, Artificial Sequence
  Cyclic GFR-binding peptide
SPINMLYFNDKQQIIYGKIPVGRTPKV

SEQ ID NO: 128014 - protein, 27 aa, Artificial Sequence
  Cyclic GFR-binding peptide
SPINMLYFDEYDKVVYGKIPVGRTPKV

SEQ ID NO: 128015 - protein, 27 aa, Artificial Sequence
  Cyclic GFR-binding peptide
SPINVLYFDDSSNVIYGKIPVGRTPKV

SEQ ID NO: 128016 - protein, 27 aa, Artificial Sequence
  Cyclic GFR-binding peptide
SPINMLYFDNGRVLLYGKIPVGRTPKV

SEQ ID NO: 128017 - protein, 27 aa, Artificial Sequence
  Cyclic GFR-binding peptide
SPINILYFDAANNVVYGKIPVGRTPKV

SEQ ID NO: 128018 - protein, 27 aa, Artificial Sequence
  Cyclic GFR-binding peptide
SPINMLYFDENEKVVYGKIPVGRTPKV

SEQ ID NO: 128019 - protein, 27 aa, Artificial Sequence
  Cyclic GFR-binding peptide
SPINILYFDSANNVVYGKIPVGRTPKV

SEQ ID NO: 128020 - protein, 27 aa, Artificial Sequence
  Cyclic GFR-binding peptide
SPINILYFDKGVVTYYGKIPVGRTPKV

SEQ ID NO: 128021 - protein, 27 aa, Artificial Sequence
  Cyclic GFR-binding peptide
SPINVLYFDDMGVPTYGKIPVGRTPKV

SEQ ID NO: 128022 - protein, 27 aa, Artificial Sequence
  Cyclic GFR-binding peptide
SPINVLYFDSSNNVIYGKIPVGRTPKV

SEQ ID NO: 128023 - protein, 27 aa, Artificial Sequence
  Cyclic GFR-binding peptide
VGRTPKVRYKKLIKPTKGIFYLISIAN

SEQ ID NO: 128024 - protein, 27 aa, Artificial Sequence
  Cyclic GFR-binding peptide
VGRTPKVRYKKLVVKDYEDFYLMSIAN

SEQ ID NO: 128025 - protein, 27 aa, Artificial Sequence
  Cyclic GFR-binding peptide
VGRTPKVRYKKLVKPTRGVFYLISIAN

SEQ ID NO: 128026 - protein, 27 aa, Artificial Sequence
  Cyclic GFR-binding peptide
VGRTPKVRYKKLVVKENEDFYLMSIAN

SEQ ID NO: 128027 - protein, 27 aa, Artificial Sequence
  Cyclic GFR-binding peptide
VGRTPKVRYKKLVKPKRGVFYLISIAN

SEQ ID NO: 128028 - protein, 27 aa, Artificial Sequence
  Cyclic GFR-binding peptide
VGRTPKVRYKKLIVNSSDDFYLVSIAN

SEQ ID NO: 128029 - protein, 27 aa, Artificial Sequence
  Cyclic GFR-binding peptide
VGRTPKVRYKKLVVNNASDFYLISIAN

SEQ ID NO: 128030 - protein, 27 aa, Artificial Sequence
  Cyclic GFR-binding peptide
NAISILYFIGKTPKILKKYRVGRTPKV

SEQ ID NO: 128031 - protein, 27 aa, Artificial Sequence
  Cyclic GFR-binding peptide
NAISMLYFDEYDKVVLKKYRVGRTPKV

SEQ ID NO: 128032 - protein, 27 aa, Artificial Sequence
  Cyclic GFR-binding peptide
NAISILYFVGRTPKVLKKYRVGRTPKV

SEQ ID NO: 128033 - protein, 27 aa, Artificial Sequence
  Cyclic GFR-binding peptide
NAISMLYFDENEKVVLKKYRVGRTPKV

SEQ ID NO: 128034 - protein, 27 aa, Artificial Sequence
  Cyclic GFR-binding peptide
NAISILYFVGRKPKVLKKYRVGRTPKV

SEQ ID NO: 128035 - protein, 27 aa, Artificial Sequence
  Cyclic GFR-binding peptide
NAISVLYFDDSSNVILKKYRVGRTPKV

SEQ ID NO: 128036 - protein, 27 aa, Artificial Sequence
  Cyclic GFR-binding peptide
NAISILYFDSANNVVLKKYRVGRTPKV

SEQ ID NO: 128037 - protein, 27 aa, Artificial Sequence
  Cyclic GFR-binding peptide
VGRTPKVEYQKYVVKENEDIYLMSIPS

SEQ ID NO: 128038 - protein, 27 aa, Artificial Sequence
  Cyclic GFR-binding peptide
VGRTPKVNSLQEVVKDYEDYYLMTLPE

SEQ ID NO: 128039 - protein, 27 aa, Artificial Sequence
  Cyclic GFR-binding peptide
VGRTPKVEYQKYVVKENEDIFLMSIPS

SEQ ID NO: 128040 - protein, 27 aa, Artificial Sequence
  Cyclic GFR-binding peptide
VGRTPKVNSLQEIKPTKGIYYVIPLPE

SEQ ID NO: 128041 - protein, 27 aa, Artificial Sequence
  Cyclic GFR-binding peptide
VGRTPKVNSLQEVKPKRGVYYLITLPE

SEQ ID NO: 128042 - protein, 27 aa, Artificial Sequence
  Cyclic GFR-binding peptide
VGRTPKVEYQKYVVNNAADIYLISIPS

SEQ ID NO: 128043 - protein, 27 aa, Artificial Sequence
  Cyclic GFR-binding peptide
VGRTPKVNSLQEVKPTRGVYYVIPLPE

SEQ ID NO: 128044 - protein, 27 aa, Artificial Sequence
  Cyclic GFR-binding peptide
VGRTPKVEYQKYIVNSSDDIFLVSIPS

SEQ ID NO: 128045 - protein, 27 aa, Artificial Sequence
  Cyclic GFR-binding peptide
VGRTPKVEYQKYVKPTRGVIFLISIPS

SEQ ID NO: 128046 - protein, 27 aa, Artificial Sequence
  Cyclic GFR-binding peptide
VGRTPKVEYQKYVVKDYEDIYLMSIPS

SEQ ID NO: 128047 - protein, 27 aa, Artificial Sequence
  Cyclic GFR-binding peptide
VGRTPKVNSLQEVVKENEDYYLMTLPE

SEQ ID NO: 128048 - protein, 27 aa, Artificial Sequence
  Cyclic GFR-binding peptide
VGRTPKVNSLQEVVNNASDYYLITLPE

SEQ ID NO: 128049 - protein, 27 aa, Artificial Sequence
  Cyclic GFR-binding peptide
VGRTPKVNSLQEVKPKRGVYYVIPLPE

SEQ ID NO: 128050 - protein, 27 aa, Artificial Sequence
  Cyclic GFR-binding peptide
VGRTPKVEYQKYIVNSSDDIYLVSIPS

SEQ ID NO: 128051 - protein, 27 aa, Artificial Sequence
  Cyclic GFR-binding peptide
VGRTPKVNSLQEVVKENEDYYVMPLPE

SEQ ID NO: 128052 - protein, 27 aa, Artificial Sequence
  Cyclic GFR-binding peptide
VGRTPKVEYQKYVVKDYEDIFLMSIPS

SEQ ID NO: 128053 - protein, 27 aa, Artificial Sequence
  Cyclic GFR-binding peptide
VGRTPKVNSLQEVVNNASDYYVIPLPE

SEQ ID NO: 128054 - protein, 27 aa, Artificial Sequence
  Cyclic GFR-binding peptide
VGRTPKVEYQKYVVNNASDIYLISIPS

SEQ ID NO: 128055 - protein, 27 aa, Artificial Sequence
  Cyclic GFR-binding peptide
VGRTPKVNSLQEVKPTRGVYYLITLPE

SEQ ID NO: 128056 - protein, 27 aa, Artificial Sequence
  Cyclic GFR-binding peptide
VGRTPKVEYQKYYTVVGKDIYLISIPS

SEQ ID NO: 128057 - protein, 27 aa, Artificial Sequence
  Cyclic GFR-binding peptide
VGRTPKVEYQKYIIQQKDNIYLMSIPS

SEQ ID NO: 128058 - protein, 27 aa, Artificial Sequence
  Cyclic GFR-binding peptide
VGRTPKVEYQKYTPVGMDDIYLVSIPS

SEQ ID NO: 128059 - protein, 27 aa, Artificial Sequence
  Cyclic GFR-binding peptide
VGRTPKVEYQKYIKPTKGIIFLISIPS

SEQ ID NO: 128060 - protein, 27 aa, Artificial Sequence
  Cyclic GFR-binding peptide
VGRTPKVEYQKYIVNNSSDIYLVSIPS

SEQ ID NO: 128061 - protein, 27 aa, Artificial Sequence
  Cyclic GFR-binding peptide
VGRTPKVNSLQEIKPTKGIYYLITLPE

SEQ ID NO: 128062 - protein, 27 aa, Artificial Sequence
  Cyclic GFR-binding peptide
VGRTPKVEYQKYVVNNASDIFLISIPS

SEQ ID NO: 128063 - protein, 27 aa, Artificial Sequence
  Cyclic GFR-binding peptide
VGRTPKVEYQKYVKPKRGVIFLISIPS

SEQ ID NO: 128064 - protein, 27 aa, Artificial Sequence
  Cyclic GFR-binding peptide
VGRTPKVNSLQEIVNSSDDYYVVPLPE

SEQ ID NO: 128065 - protein, 27 aa, Artificial Sequence
  Cyclic GFR-binding peptide
VGRTPKVNSLQEVVKDYEDYYVMPLPE

SEQ ID NO: 128066 - protein, 27 aa, Artificial Sequence
  Cyclic GFR-binding peptide
VGRTPKVEYQKYLLVRGNDIYLMSIPS

SEQ ID NO: 128067 - protein, 27 aa, Artificial Sequence
  Cyclic GFR-binding peptide
VGRTPKVNSLQEIVNSSDDYYLVTLPE

SEQ ID NO: 128068 - protein, 27 aa, Artificial Sequence
  Cyclic GFR-binding peptide
SPISMLYIDENEKVVYKQYEVGRTPKV

SEQ ID NO: 128069 - protein, 27 aa, Artificial Sequence
  Cyclic GFR-binding peptide
EPLTMLYYDEYDKVVEQLSNVGRTPKV

SEQ ID NO: 128070 - protein, 27 aa, Artificial Sequence
  Cyclic GFR-binding peptide
SPISMLFIDENEKVVYKQYEVGRTPKV

SEQ ID NO: 128071 - protein, 27 aa, Artificial Sequence
  Cyclic GFR-binding peptide
EPLPIVYYIGKTPKIEQLSNVGRTPKV

SEQ ID NO: 128072 - protein, 27 aa, Artificial Sequence
  Cyclic GFR-binding peptide
EPLTILYYVGRKPKVEQLSNVGRTPKV

SEQ ID NO: 128073 - protein, 27 aa, Artificial Sequence
  Cyclic GFR-binding peptide
SPISILYIDAANNVVYKQYEVGRTPKV

SEQ ID NO: 128074 - protein, 27 aa, Artificial Sequence
  Cyclic GFR-binding peptide
EPLPIVYYVGRTPKVEQLSNVGRTPKV

SEQ ID NO: 128075 - protein, 27 aa, Artificial Sequence
  Cyclic GFR-binding peptide
SPISVLFIDDSSNVIYKQYEVGRTPKV

SEQ ID NO: 128076 - protein, 27 aa, Artificial Sequence
  Cyclic GFR-binding peptide
SPISILFIVGRTPKVYKQYEVGRTPKV

SEQ ID NO: 128077 - protein, 27 aa, Artificial Sequence
  Cyclic GFR-binding peptide
SPISMLYIDEYDKVVYKQYEVGRTPKV

SEQ ID NO: 128078 - protein, 27 aa, Artificial Sequence
  Cyclic GFR-binding peptide
EPLTMLYYDENEKVVEQLSNVGRTPKV

SEQ ID NO: 128079 - protein, 27 aa, Artificial Sequence
  Cyclic GFR-binding peptide
EPLTILYYDSANNVVEQLSNVGRTPKV

SEQ ID NO: 128080 - protein, 27 aa, Artificial Sequence
  Cyclic GFR-binding peptide
EPLPIVYYVGRKPKVEQLSNVGRTPKV

SEQ ID NO: 128081 - protein, 27 aa, Artificial Sequence
  Cyclic GFR-binding peptide
SPISVLYIDDSSNVIYKQYEVGRTPKV

SEQ ID NO: 128082 - protein, 27 aa, Artificial Sequence
  Cyclic GFR-binding peptide
EPLPMVYYDENEKVVEQLSNVGRTPKV

SEQ ID NO: 128083 - protein, 27 aa, Artificial Sequence
  Cyclic GFR-binding peptide
SPISMLFIDEYDKVVYKQYEVGRTPKV

SEQ ID NO: 128084 - protein, 27 aa, Artificial Sequence
  Cyclic GFR-binding peptide
EPLPIVYYDSANNVVEQLSNVGRTPKV

SEQ ID NO: 128085 - protein, 27 aa, Artificial Sequence
  Cyclic GFR-binding peptide
SPISILYIDSANNVVYKQYEVGRTPKV

SEQ ID NO: 128086 - protein, 27 aa, Artificial Sequence
  Cyclic GFR-binding peptide
EPLTILYYVGRTPKVEQLSNVGRTPKV

SEQ ID NO: 128087 - protein, 27 aa, Artificial Sequence
  Cyclic GFR-binding peptide
SPISILYIDKGVVTYYKQYEVGRTPKV

SEQ ID NO: 128088 - protein, 27 aa, Artificial Sequence
  Cyclic GFR-binding peptide
SPISMLYINDKQQIIYKQYEVGRTPKV

SEQ ID NO: 128089 - protein, 27 aa, Artificial Sequence
  Cyclic GFR-binding peptide
SPISVLYIDDMGVPTYKQYEVGRTPKV

SEQ ID NO: 128090 - protein, 27 aa, Artificial Sequence
  Cyclic GFR-binding peptide
SPISILFIIGKTPKIYKQYEVGRTPKV

SEQ ID NO: 128091 - protein, 27 aa, Artificial Sequence
  Cyclic GFR-binding peptide
SPISVLYIDSSNNVIYKQYEVGRTPKV

SEQ ID NO: 128092 - protein, 27 aa, Artificial Sequence
  Cyclic GFR-binding peptide
EPLTILYYIGKTPKIEQLSNVGRTPKV

SEQ ID NO: 128093 - protein, 27 aa, Artificial Sequence
  Cyclic GFR-binding peptide
SPISILFIDSANNVVYKQYEVGRTPKV

SEQ ID NO: 128094 - protein, 27 aa, Artificial Sequence
  Cyclic GFR-binding peptide
SPISILFIVGRKPKVYKQYEVGRTPKV

SEQ ID NO: 128095 - protein, 27 aa, Artificial Sequence
  Cyclic GFR-binding peptide
EPLPVVYYDDSSNVIEQLSNVGRTPKV

SEQ ID NO: 128096 - protein, 27 aa, Artificial Sequence
  Cyclic GFR-binding peptide
EPLPMVYYDEYDKVVEQLSNVGRTPKV

SEQ ID NO: 128097 - protein, 27 aa, Artificial Sequence
  Cyclic GFR-binding peptide
SPISMLYIDNGRVLLYKQYEVGRTPKV

SEQ ID NO: 128098 - protein, 27 aa, Artificial Sequence
  Cyclic GFR-binding peptide
EPLTVLYYDDSSNVIEQLSNVGRTPKV

SEQ ID NO: 128099 - protein, 27 aa, Artificial Sequence
  Cyclic GFR-binding peptide
VGRTPKVPYVKLVVKENEDFFLMSLSS

SEQ ID NO: 128100 - protein, 29 aa, Artificial Sequence
  Cyclic GFR-binding peptide
VGRTPKVPYVKLHQGQHPKIRFFLMSLSS

SEQ ID NO: 128101 - protein, 27 aa, Artificial Sequence
  Cyclic GFR-binding peptide
VGRTPKVPYVKLVVNKNEDFFLISLSS

SEQ ID NO: 128102 - protein, 27 aa, Artificial Sequence
  Cyclic GFR-binding peptide
VGRTPKVPYVKLVKPKRGVLFFISLSS

SEQ ID NO: 128103 - protein, 27 aa, Artificial Sequence
  Cyclic GFR-binding peptide
VGRTPKVPYVKLVVNNAADFFLISLSS

SEQ ID NO: 128104 - protein, 27 aa, Artificial Sequence
  Cyclic GFR-binding peptide
VGRTPKVPYVKLIVNNSSDFFLVSLSS

SEQ ID NO: 128105 - protein, 27 aa, Artificial Sequence
  Cyclic GFR-binding peptide
VGRTPKVPYVKLIIQQKDNFFLMSLSS

SEQ ID NO: 128106 - protein, 27 aa, Artificial Sequence
  Cyclic GFR-binding peptide
VGRTPKVPYVKLLLVRGNDFFLMSLSS

SEQ ID NO: 128107 - protein, 27 aa, Artificial Sequence
  Cyclic GFR-binding peptide
VGRTPKVPYVKLVKPTRGVLFFISLSS

SEQ ID NO: 128108 - protein, 27 aa, Artificial Sequence
  Cyclic GFR-binding peptide
VGRTPKVPYVKLVVNNASDFFLISLSS

SEQ ID NO: 128109 - protein, 27 aa, Artificial Sequence
  Cyclic GFR-binding peptide
VGRTPKVPYVKLIKPTKGILFFISLSS

SEQ ID NO: 128110 - protein, 27 aa, Artificial Sequence
  Cyclic GFR-binding peptide
VGRTPKVPYVKLTPVGMDDFFLVSLSS

SEQ ID NO: 128111 - protein, 27 aa, Artificial Sequence
  Cyclic GFR-binding peptide
VGRTPKVPYVKLYTVVGKDFFLISLSS

SEQ ID NO: 128112 - protein, 27 aa, Artificial Sequence
  Cyclic GFR-binding peptide
VGRTPKVPYVKLVVKDYEDFFLMSLSS

SEQ ID NO: 128113 - protein, 27 aa, Artificial Sequence
  Cyclic GFR-binding peptide
VGRTPKVPYVKLIVNSSDDFFLVSLSS

SEQ ID NO: 128114 - protein, 29 aa, Artificial Sequence
  Cyclic GFR-binding peptide
VGRTPKVPYVKLLKPKKRVYEFFLVSLSS

SEQ ID NO: 128115 - protein, 27 aa, Artificial Sequence
  Cyclic GFR-binding peptide
SSLSMLFFDENEKVVLKVYPVGRTPKV

SEQ ID NO: 128116 - protein, 29 aa, Artificial Sequence
  Cyclic GFR-binding peptide
SSLSMLFFRIKPHQGQHLKVYPVGRTPKV

SEQ ID NO: 128117 - protein, 27 aa, Artificial Sequence
  Cyclic GFR-binding peptide
SSLSILFFDENKNVVLKVYPVGRTPKV

SEQ ID NO: 128118 - protein, 27 aa, Artificial Sequence
  Cyclic GFR-binding peptide
SSLSILFFVGRKPKVLKVYPVGRTPKV

SEQ ID NO: 128119 - protein, 27 aa, Artificial Sequence
  Cyclic GFR-binding peptide
SSLSILFFDAANNVVLKVYPVGRTPKV

SEQ ID NO: 128120 - protein, 27 aa, Artificial Sequence
  Cyclic GFR-binding peptide
SSLSVLFFDSSNNVILKVYPVGRTPKV

SEQ ID NO: 128121 - protein, 27 aa, Artificial Sequence
  Cyclic GFR-binding peptide
SSLSMLFFNDKQQIILKVYPVGRTPKV

SEQ ID NO: 128122 - protein, 27 aa, Artificial Sequence
  Cyclic GFR-binding peptide
SSLSMLFFDNGRVLLLKVYPVGRTPKV

SEQ ID NO: 128123 - protein, 27 aa, Artificial Sequence
  Cyclic GFR-binding peptide
SSLSILFFVGRTPKVLKVYPVGRTPKV

SEQ ID NO: 128124 - protein, 27 aa, Artificial Sequence
  Cyclic GFR-binding peptide
SSLSILFFDSANNVVLKVYPVGRTPKV

SEQ ID NO: 128125 - protein, 27 aa, Artificial Sequence
  Cyclic GFR-binding peptide
SSLSILFFIGKTPKILKVYPVGRTPKV

SEQ ID NO: 128126 - protein, 27 aa, Artificial Sequence
  Cyclic GFR-binding peptide
SSLSVLFFDDMGVPTLKVYPVGRTPKV

SEQ ID NO: 128127 - protein, 27 aa, Artificial Sequence
  Cyclic GFR-binding peptide
SSLSILFFDKGVVTYLKVYPVGRTPKV

SEQ ID NO: 128128 - protein, 27 aa, Artificial Sequence
  Cyclic GFR-binding peptide
SSLSMLFFDEYDKVVLKVYPVGRTPKV

SEQ ID NO: 128129 - protein, 27 aa, Artificial Sequence
  Cyclic GFR-binding peptide
SSLSVLFFDDSSNVILKVYPVGRTPKV

SEQ ID NO: 128130 - protein, 29 aa, Artificial Sequence
  Cyclic GFR-binding peptide
SSLSVLFFEYVRKKPKLLKVYPVGRTPKV

SEQ ID NO: 128131 - protein, 27 aa, Artificial Sequence
  Cyclic GFR-binding peptide
VGRTPKVNSLQEVVKDYEDYYLMTLPE

SEQ ID NO: 128132 - protein, 27 aa, Artificial Sequence
  Cyclic GFR-binding peptide
VGRTPKVNSLQEIKPTKGIYYVIPLPE

SEQ ID NO: 128133 - protein, 27 aa, Artificial Sequence
  Cyclic GFR-binding peptide
VGRTPKVSMEGIIVNSSDDMIQVTINS

SEQ ID NO: 128134 - protein, 27 aa, Artificial Sequence
  Cyclic GFR-binding peptide
VGRTPKVNSLQEVKPKRGVYYLITLPE

SEQ ID NO: 128135 - protein, 27 aa, Artificial Sequence
  Cyclic GFR-binding peptide
VGRTPKVNSLQEVKPTRGVYYVIPLPE

SEQ ID NO: 128136 - protein, 27 aa, Artificial Sequence
  Cyclic GFR-binding peptide
VGRTPKVVTAKKVVKENEDIKRMQVPR

SEQ ID NO: 128137 - protein, 27 aa, Artificial Sequence
  Cyclic GFR-binding peptide
VGRTPKVNSLQEIVNSSDDYYVVPLPE

SEQ ID NO: 128138 - protein, 29 aa, Artificial Sequence
  Cyclic GFR-binding peptide
VGRTPKVSMEGIHQGQHPKIRMIQMTINS

SEQ ID NO: 128139 - protein, 29 aa, Artificial Sequence
  Cyclic GFR-binding peptide
VGRTPKVVTAKKLKPKKRVYEIKRVQVPR

SEQ ID NO: 128140 - protein, 27 aa, Artificial Sequence
  Cyclic GFR-binding peptide
VGRTPKVSMEGIVVKDYEDMIQMTINS

SEQ ID NO: 128141 - protein, 29 aa, Artificial Sequence
  Cyclic GFR-binding peptide
VGRTPKVVQVEKHQGQHPKIRVKAMKVSR

SEQ ID NO: 128142 - protein, 27 aa, Artificial Sequence
  Cyclic GFR-binding peptide
VGRTPKVVTAKKIKPTKGIIKRIQVPR

SEQ ID NO: 128143 - protein, 27 aa, Artificial Sequence
  Cyclic GFR-binding peptide
VGRTPKVSMEGIVKPTRGVMIQITINS

SEQ ID NO: 128144 - protein, 29 aa, Artificial Sequence
  Cyclic GFR-binding peptide
VGRTPKVNSLQEFIPKKRVIEYYVVPLPE

SEQ ID NO: 128145 - protein, 27 aa, Artificial Sequence
  Cyclic GFR-binding peptide
VGRTPKVVQVEKVKPKRGVVKAIKVSR

SEQ ID NO: 128146 - protein, 27 aa, Artificial Sequence
  Cyclic GFR-binding peptide
VGRTPKVVQVEKVVKENEDVKAMKVSR

SEQ ID NO: 128147 - protein, 27 aa, Artificial Sequence
  Cyclic GFR-binding peptide
VGRTPKVNSLQEVVKENEDYYVMPLPE

SEQ ID NO: 128148 - protein, 27 aa, Artificial Sequence
  Cyclic GFR-binding peptide
VGRTPKVVTAKKIVNSSDDIKRVQVPR

SEQ ID NO: 128149 - protein, 27 aa, Artificial Sequence
  Cyclic GFR-binding peptide
VGRTPKVVQVEKIKPTKGIVKAIKVSR

SEQ ID NO: 128150 - protein, 27 aa, Artificial Sequence
  Cyclic GFR-binding peptide
VGRTPKVNSLQEIKPTKGIYYLITLPE

SEQ ID NO: 128151 - protein, 29 aa, Artificial Sequence
  Cyclic GFR-binding peptide
VGRTPKVNSLQEFIPKKRVIEYYLVTLPE

SEQ ID NO: 128152 - protein, 27 aa, Artificial Sequence
  Cyclic GFR-binding peptide
VGRTPKVVQVEKIVNSSDDVKAVKVSR

SEQ ID NO: 128153 - protein, 27 aa, Artificial Sequence
  Cyclic GFR-binding peptide
VGRTPKVNSLQEIVNSSDDYYLVTLPE

SEQ ID NO: 128154 - protein, 29 aa, Artificial Sequence
  Cyclic GFR-binding peptide
VGRTPKVVQVEKLKPKKRVYEVKAVKVSR

SEQ ID NO: 128155 - protein, 29 aa, Artificial Sequence
  Cyclic GFR-binding peptide
VGRTPKVVQVEKFIPKKRVIEVKAVKVSR

SEQ ID NO: 128156 - protein, 29 aa, Artificial Sequence
  Cyclic GFR-binding peptide
VGRTPKVVTAKKHQGQHPKIRIKRMQVPR

SEQ ID NO: 128157 - protein, 27 aa, Artificial Sequence
  Cyclic GFR-binding peptide
VGRTPKVNSLQEVVKENEDYYLMTLPE

SEQ ID NO: 128158 - protein, 29 aa, Artificial Sequence
  Cyclic GFR-binding peptide
VGRTPKVSMEGIFIPKKRVIEMIQVTINS

SEQ ID NO: 128159 - protein, 27 aa, Artificial Sequence
  Cyclic GFR-binding peptide
VGRTPKVNSLQEVKPKRGVYYVIPLPE

SEQ ID NO: 128160 - protein, 27 aa, Artificial Sequence
  Cyclic GFR-binding peptide
VGRTPKVVTAKKVKPKRGVIKRIQVPR

SEQ ID NO: 128161 - protein, 27 aa, Artificial Sequence
  Cyclic GFR-binding peptide
VGRTPKVNSLQEVKPTRGVYYLITLPE

SEQ ID NO: 128162 - protein, 27 aa, Artificial Sequence
  Cyclic GFR-binding peptide
VGRTPKVVQVEKVKPTRGVVKAIKVSR

SEQ ID NO: 128163 - protein, 29 aa, Artificial Sequence
  Cyclic GFR-binding peptide
VGRTPKVSMEGILKPKKRVYEMIQVTINS

SEQ ID NO: 128164 - protein, 27 aa, Artificial Sequence
  Cyclic GFR-binding peptide
VGRTPKVNSLQEVVKDYEDYYVMPLPE

SEQ ID NO: 128165 - protein, 27 aa, Artificial Sequence
  Cyclic GFR-binding peptide
VGRTPKVVTAKKVKPTRGVIKRIQVPR

SEQ ID NO: 128166 - protein, 29 aa, Artificial Sequence
  Cyclic GFR-binding peptide
VGRTPKVNSLQELKPKKRVYEYYLVTLPE

SEQ ID NO: 128167 - protein, 27 aa, Artificial Sequence
  Cyclic GFR-binding peptide
VGRTPKVSMEGIVKPKRGVMIQITINS

SEQ ID NO: 128168 - protein, 27 aa, Artificial Sequence
  Cyclic GFR-binding peptide
VGRTPKVSMEGIVVKENEDMIQMTINS

SEQ ID NO: 128169 - protein, 27 aa, Artificial Sequence
  Cyclic GFR-binding peptide
VGRTPKVSMEGIIKPTKGIMIQITINS

SEQ ID NO: 128170 - protein, 29 aa, Artificial Sequence
  Cyclic GFR-binding peptide
VGRTPKVNSLQEHQGQHPKIRYYLMTLPE

SEQ ID NO: 128171 - protein, 27 aa, Artificial Sequence
  Cyclic GFR-binding peptide
VGRTPKVVTAKKVVKDYEDIKRMQVPR

SEQ ID NO: 128172 - protein, 29 aa, Artificial Sequence
  Cyclic GFR-binding peptide
VGRTPKVNSLQEHQGQHPKIRYYVMPLPE

SEQ ID NO: 128173 - protein, 29 aa, Artificial Sequence
  Cyclic GFR-binding peptide
VGRTPKVNSLQELKPKKRVYEYYVVPLPE

SEQ ID NO: 128174 - protein, 29 aa, Artificial Sequence
  Cyclic GFR-binding peptide
VGRTPKVVTAKKFIPKKRVIEIKRVQVPR

SEQ ID NO: 128175 - protein, 27 aa, Artificial Sequence
  Cyclic GFR-binding peptide
VGRTPKVVQVEKVVKDYEDVKAMKVSR

SEQ ID NO: 128176 - protein, 27 aa, Artificial Sequence
  Cyclic GFR-binding peptide
EPLTMLYYDEYDKVVEQLSNVGRTPKV

SEQ ID NO: 128177 - protein, 27 aa, Artificial Sequence
  Cyclic GFR-binding peptide
EPLPIVYYIGKTPKIEQLSNVGRTPKV

SEQ ID NO: 128178 - protein, 27 aa, Artificial Sequence
  Cyclic GFR-binding peptide
SNITVQIMDDSSNVIIGEMSVGRTPKV

SEQ ID NO: 128179 - protein, 27 aa, Artificial Sequence
  Cyclic GFR-binding peptide
EPLTILYYVGRKPKVEQLSNVGRTPKV

SEQ ID NO: 128180 - protein, 27 aa, Artificial Sequence
  Cyclic GFR-binding peptide
EPLPIVYYVGRTPKVEQLSNVGRTPKV

SEQ ID NO: 128181 - protein, 27 aa, Artificial Sequence
  Cyclic GFR-binding peptide
RPVQMRKIDENEKVVKKATVVGRTPKV

SEQ ID NO: 128182 - protein, 27 aa, Artificial Sequence
  Cyclic GFR-binding peptide
EPLPVVYYDDSSNVIEQLSNVGRTPKV

SEQ ID NO: 128183 - protein, 29 aa, Artificial Sequence
  Cyclic GFR-binding peptide
SNITMQIMRIKPHQGQHIGEMSVGRTPKV

SEQ ID NO: 128184 - protein, 29 aa, Artificial Sequence
  Cyclic GFR-binding peptide
RPVQVRKIEYVRKKPKLKKATVVGRTPKV

SEQ ID NO: 128185 - protein, 27 aa, Artificial Sequence
  Cyclic GFR-binding peptide
SNITMQIMDEYDKVVIGEMSVGRTPKV

SEQ ID NO: 128186 - protein, 29 aa, Artificial Sequence
  Cyclic GFR-binding peptide
RSVKMAKVRIKPHQGQHKEVQVVGRTPKV

SEQ ID NO: 128187 - protein, 27 aa, Artificial Sequence
  Cyclic GFR-binding peptide
RPVQIRKIIGKTPKIKKATVVGRTPKV

SEQ ID NO: 128188 - protein, 27 aa, Artificial Sequence
  Cyclic GFR-binding peptide
SNITIQIMVGRTPKVIGEMSVGRTPKV

SEQ ID NO: 128189 - protein, 29 aa, Artificial Sequence
  Cyclic GFR-binding peptide
EPLPVVYYEIVRKKPIFEQLSNVGRTPKV

SEQ ID NO: 128190 - protein, 27 aa, Artificial Sequence
  Cyclic GFR-binding peptide
RSVKIAKVVGRKPKVKEVQVVGRTPKV

SEQ ID NO: 128191 - protein, 27 aa, Artificial Sequence
  Cyclic GFR-binding peptide
RSVKMAKVDENEKVVKEVQVVGRTPKV

SEQ ID NO: 128192 - protein, 27 aa, Artificial Sequence
  Cyclic GFR-binding peptide
EPLPMVYYDENEKVVEQLSNVGRTPKV

SEQ ID NO: 128193 - protein, 27 aa, Artificial Sequence
  Cyclic GFR-binding peptide
RPVQVRKIDDSSNVIKKATVVGRTPKV

SEQ ID NO: 128194 - protein, 27 aa, Artificial Sequence
  Cyclic GFR-binding peptide
RSVKIAKVIGKTPKIKEVQVVGRTPKV

SEQ ID NO: 128195 - protein, 27 aa, Artificial Sequence
  Cyclic GFR-binding peptide
EPLTILYYIGKTPKIEQLSNVGRTPKV

SEQ ID NO: 128196 - protein, 29 aa, Artificial Sequence
  Cyclic GFR-binding peptide
EPLTVLYYEIVRKKPIFEQLSNVGRTPKV

SEQ ID NO: 128197 - protein, 27 aa, Artificial Sequence
  Cyclic GFR-binding peptide
RSVKVAKVDDSSNVIKEVQVVGRTPKV

SEQ ID NO: 128198 - protein, 27 aa, Artificial Sequence
  Cyclic GFR-binding peptide
EPLTVLYYDDSSNVIEQLSNVGRTPKV

SEQ ID NO: 128199 - protein, 29 aa, Artificial Sequence
  Cyclic GFR-binding peptide
RSVKVAKVEYVRKKPKLKEVQVVGRTPKV

SEQ ID NO: 128200 - protein, 29 aa, Artificial Sequence
  Cyclic GFR-binding peptide
RSVKVAKVEIVRKKPIFKEVQVVGRTPKV

SEQ ID NO: 128201 - protein, 29 aa, Artificial Sequence
  Cyclic GFR-binding peptide
RPVQMRKIRIKPHQGQHKKATVVGRTPKV

SEQ ID NO: 128202 - protein, 27 aa, Artificial Sequence
  Cyclic GFR-binding peptide
EPLTMLYYDENEKVVEQLSNVGRTPKV

SEQ ID NO: 128203 - protein, 29 aa, Artificial Sequence
  Cyclic GFR-binding peptide
SNITVQIMEIVRKKPIFIGEMSVGRTPKV

SEQ ID NO: 128204 - protein, 27 aa, Artificial Sequence
  Cyclic GFR-binding peptide
EPLPIVYYVGRKPKVEQLSNVGRTPKV

SEQ ID NO: 128205 - protein, 27 aa, Artificial Sequence
  Cyclic GFR-binding peptide
RPVQIRKIVGRKPKVKKATVVGRTPKV

SEQ ID NO: 128206 - protein, 27 aa, Artificial Sequence
  Cyclic GFR-binding peptide
EPLTILYYVGRTPKVEQLSNVGRTPKV

SEQ ID NO: 128207 - protein, 27 aa, Artificial Sequence
  Cyclic GFR-binding peptide
RSVKIAKVVGRTPKVKEVQVVGRTPKV

SEQ ID NO: 128208 - protein, 29 aa, Artificial Sequence
  Cyclic GFR-binding peptide
SNITVQIMEYVRKKPKLIGEMSVGRTPKV

SEQ ID NO: 128209 - protein, 27 aa, Artificial Sequence
  Cyclic GFR-binding peptide
EPLPMVYYDEYDKVVEQLSNVGRTPKV

SEQ ID NO: 128210 - protein, 27 aa, Artificial Sequence
  Cyclic GFR-binding peptide
RPVQIRKIVGRTPKVKKATVVGRTPKV

SEQ ID NO: 128211 - protein, 29 aa, Artificial Sequence
  Cyclic GFR-binding peptide
EPLTVLYYEYVRKKPKLEQLSNVGRTPKV

SEQ ID NO: 128212 - protein, 27 aa, Artificial Sequence
  Cyclic GFR-binding peptide
SNITIQIMVGRKPKVIGEMSVGRTPKV

SEQ ID NO: 128213 - protein, 27 aa, Artificial Sequence
  Cyclic GFR-binding peptide
SNITMQIMDENEKVVIGEMSVGRTPKV

SEQ ID NO: 128214 - protein, 27 aa, Artificial Sequence
  Cyclic GFR-binding peptide
SNITIQIMIGKTPKIIGEMSVGRTPKV

SEQ ID NO: 128215 - protein, 29 aa, Artificial Sequence
  Cyclic GFR-binding peptide
EPLTMLYYRIKPHQGQHEQLSNVGRTPKV

SEQ ID NO: 128216 - protein, 27 aa, Artificial Sequence
  Cyclic GFR-binding peptide
RPVQMRKIDEYDKVVKKATVVGRTPKV

SEQ ID NO: 128217 - protein, 29 aa, Artificial Sequence
  Cyclic GFR-binding peptide
EPLPMVYYRIKPHQGQHEQLSNVGRTPKV

SEQ ID NO: 128218 - protein, 29 aa, Artificial Sequence
  Cyclic GFR-binding peptide
EPLPVVYYEYVRKKPKLEQLSNVGRTPKV

SEQ ID NO: 128219 - protein, 29 aa, Artificial Sequence
  Cyclic GFR-binding peptide
RPVQVRKIEIVRKKPIFKKATVVGRTPKV

SEQ ID NO: 128220 - protein, 27 aa, Artificial Sequence
  Cyclic GFR-binding peptide
RSVKMAKVDEYDKVVKEVQVVGRTPKV

SEQ ID NO: 128221 - protein, 27 aa, Artificial Sequence
  Cyclic GFR-binding peptide
VGRTPKVRYKKLIIQQKDNFYLMSIAN

SEQ ID NO: 128222 - protein, 27 aa, Artificial Sequence
  Cyclic GFR-binding peptide
VGRTPKVRYKKLIVNNSSDFYLVSIAN

SEQ ID NO: 128223 - protein, 27 aa, Artificial Sequence
  Cyclic GFR-binding peptide
VGRTPKVRYKKLYTVVGKDFYLISIAN

SEQ ID NO: 128224 - protein, 27 aa, Artificial Sequence
  Cyclic GFR-binding peptide
VGRTPKVRYKKLIVNSSDDFYLVSIAN

SEQ ID NO: 128225 - protein, 27 aa, Artificial Sequence
  Cyclic GFR-binding peptide
VGRTPKVRYKKLVVKDYEDFYLMSIAN

SEQ ID NO: 128226 - protein, 27 aa, Artificial Sequence
  Cyclic GFR-binding peptide
VGRTPKVRYKKLLLVRGNDFYLMSIAN

SEQ ID NO: 128227 - protein, 27 aa, Artificial Sequence
  Cyclic GFR-binding peptide
VGRTPKVRYKKLVVKENEDFYLMSIAN

SEQ ID NO: 128228 - protein, 27 aa, Artificial Sequence
  Cyclic GFR-binding peptide
VGRTPKVRYKKLVVNNAADFYLISIAN

SEQ ID NO: 128229 - protein, 27 aa, Artificial Sequence
  Cyclic GFR-binding peptide
VGRTPKVRYKKLTPVGMDDFYLVSIAN

SEQ ID NO: 128230 - protein, 27 aa, Artificial Sequence
  Cyclic GFR-binding peptide
VGRTPKVRYKKLVVNNASDFYLISIAN

SEQ ID NO: 128231 - protein, 27 aa, Artificial Sequence
  Cyclic GFR-binding peptide
NAISMLYFNDKQQIILKKYRVGRTPKV

SEQ ID NO: 128232 - protein, 27 aa, Artificial Sequence
  Cyclic GFR-binding peptide
NAISVLYFDSSNNVILKKYRVGRTPKV

SEQ ID NO: 128233 - protein, 27 aa, Artificial Sequence
  Cyclic GFR-binding peptide
NAISILYFDKGVVTYLKKYRVGRTPKV

SEQ ID NO: 128234 - protein, 27 aa, Artificial Sequence
  Cyclic GFR-binding peptide
NAISVLYFDDSSNVILKKYRVGRTPKV

SEQ ID NO: 128235 - protein, 27 aa, Artificial Sequence
  Cyclic GFR-binding peptide
NAISMLYFDEYDKVVLKKYRVGRTPKV

SEQ ID NO: 128236 - protein, 27 aa, Artificial Sequence
  Cyclic GFR-binding peptide
NAISMLYFDNGRVLLLKKYRVGRTPKV

SEQ ID NO: 128237 - protein, 27 aa, Artificial Sequence
  Cyclic GFR-binding peptide
NAISMLYFDENEKVVLKKYRVGRTPKV

SEQ ID NO: 128238 - protein, 27 aa, Artificial Sequence
  Cyclic GFR-binding peptide
NAISILYFDAANNVVLKKYRVGRTPKV

SEQ ID NO: 128239 - protein, 27 aa, Artificial Sequence
  Cyclic GFR-binding peptide
NAISVLYFDDMGVPTLKKYRVGRTPKV

SEQ ID NO: 128240 - protein, 27 aa, Artificial Sequence
  Cyclic GFR-binding peptide
NAISILYFDSANNVVLKKYRVGRTPKV

SEQ ID NO: 128241 - protein, 27 aa, Artificial Sequence
  Cyclic GFR-binding peptide
VGRTPKVEYKFKVKPTRGVLYLISIPE

SEQ ID NO: 128242 - protein, 27 aa, Artificial Sequence
  Cyclic GFR-binding peptide
VGRTPKVYHYKLVVKDYEDKYLMSIPS

SEQ ID NO: 128243 - protein, 27 aa, Artificial Sequence
  Cyclic GFR-binding peptide
VGRTPKVEYKFKTPVGMDDLYLVSIPE

SEQ ID NO: 128244 - protein, 27 aa, Artificial Sequence
  Cyclic GFR-binding peptide
VGRTPKVRYKKLVVKDYEDFYLMSIAN

SEQ ID NO: 128245 - protein, 27 aa, Artificial Sequence
  Cyclic GFR-binding peptide
VGRTPKVRHKRLVKPKRGVYYLISTAS

SEQ ID NO: 128246 - protein, 27 aa, Artificial Sequence
  Cyclic GFR-binding peptide
VGRTPKVYHYKLVKPKRGVKYLISIPS

SEQ ID NO: 128247 - protein, 27 aa, Artificial Sequence
  Cyclic GFR-binding peptide
VGRTPKVEYKFKIKPTKGILYLISIPE

SEQ ID NO: 128248 - protein, 27 aa, Artificial Sequence
  Cyclic GFR-binding peptide
VGRTPKVEYKFKVVNKNEDLYLISIPE

SEQ ID NO: 128249 - protein, 27 aa, Artificial Sequence
  Cyclic GFR-binding peptide
VGRTPKVPIKGYVKPTRGVFYLINIPS

SEQ ID NO: 128250 - protein, 27 aa, Artificial Sequence
  Cyclic GFR-binding peptide
VGRTPKVPIKGYVVKENEDFYLMNIPS

SEQ ID NO: 128251 - protein, 27 aa, Artificial Sequence
  Cyclic GFR-binding peptide
VGRTPKVYHYKLYTVVGKDKYLISIPS

SEQ ID NO: 128252 - protein, 27 aa, Artificial Sequence
  Cyclic GFR-binding peptide
VGRTPKVEYKFKLLVRGNDLYLMSIPE

SEQ ID NO: 128253 - protein, 27 aa, Artificial Sequence
  Cyclic GFR-binding peptide
VGRTPKVRYKKLVKPKRGVFYLISIAN

SEQ ID NO: 128254 - protein, 27 aa, Artificial Sequence
  Cyclic GFR-binding peptide
VGRTPKVPIKGYTPVGMDDFYLVNIPS

SEQ ID NO: 128255 - protein, 27 aa, Artificial Sequence
  Cyclic GFR-binding peptide
VGRTPKVYHYKLVVNKNEDKYLISIPS

SEQ ID NO: 128256 - protein, 27 aa, Artificial Sequence
  Cyclic GFR-binding peptide
VGRTPKVYHYKLIVNSSDDKYLVSIPS

SEQ ID NO: 128257 - protein, 27 aa, Artificial Sequence
  Cyclic GFR-binding peptide
VGRTPKVPIKGYIVNSSDDFYLVNIPS

SEQ ID NO: 128258 - protein, 27 aa, Artificial Sequence
  Cyclic GFR-binding peptide
VGRTPKVRYKKLYTVVGKDFYLISIAN

SEQ ID NO: 128259 - protein, 27 aa, Artificial Sequence
  Cyclic GFR-binding peptide
VGRTPKVRHKRLLLVRGNDYYLMSTAS

SEQ ID NO: 128260 - protein, 27 aa, Artificial Sequence
  Cyclic GFR-binding peptide
VGRTPKVYHYKLLLVRGNDKYLMSIPS

SEQ ID NO: 128261 - protein, 27 aa, Artificial Sequence
  Cyclic GFR-binding peptide
VGRTPKVRYKKLIVNSSDDFYLVSIAN

SEQ ID NO: 128262 - protein, 27 aa, Artificial Sequence
  Cyclic GFR-binding peptide
VGRTPKVRHKRLVVNKNEDYYLISTAS

SEQ ID NO: 128263 - protein, 27 aa, Artificial Sequence
  Cyclic GFR-binding peptide
VGRTPKVRHKRLIKPTKGIYYLISTAS

SEQ ID NO: 128264 - protein, 27 aa, Artificial Sequence
  Cyclic GFR-binding peptide
VGRTPKVPIKGYYTVVGKDFYLINIPS

SEQ ID NO: 128265 - protein, 27 aa, Artificial Sequence
  Cyclic GFR-binding peptide
VGRTPKVYHYKLTPVGMDDKYLVSIPS

SEQ ID NO: 128266 - protein, 27 aa, Artificial Sequence
  Cyclic GFR-binding peptide
VGRTPKVRHKRLIVNNSSDYYLVSTAS

SEQ ID NO: 128267 - protein, 27 aa, Artificial Sequence
  Cyclic GFR-binding peptide
VGRTPKVRYKKLLLVRGNDFYLMSIAN

SEQ ID NO: 128268 - protein, 27 aa, Artificial Sequence
  Cyclic GFR-binding peptide
VGRTPKVYHYKLVKPTRGVKYLISIPS

SEQ ID NO: 128269 - protein, 27 aa, Artificial Sequence
  Cyclic GFR-binding peptide
VGRTPKVRHKRLIVNSSDDYYLVSTAS

SEQ ID NO: 128270 - protein, 27 aa, Artificial Sequence
  Cyclic GFR-binding peptide
VGRTPKVPIKGYLLVRGNDFYLMNIPS

SEQ ID NO: 128271 - protein, 27 aa, Artificial Sequence
  Cyclic GFR-binding peptide
VGRTPKVRYKKLVVNKNEDFYLISIAN

SEQ ID NO: 128272 - protein, 27 aa, Artificial Sequence
  Cyclic GFR-binding peptide
VGRTPKVEYKFKVVKDYEDLYLMSIPE

SEQ ID NO: 128273 - protein, 27 aa, Artificial Sequence
  Cyclic GFR-binding peptide
VGRTPKVPIKGYVVNKNEDFYLINIPS

SEQ ID NO: 128274 - protein, 27 aa, Artificial Sequence
  Cyclic GFR-binding peptide
VGRTPKVPIKGYIKPTKGIFYLINIPS

SEQ ID NO: 128275 - protein, 27 aa, Artificial Sequence
  Cyclic GFR-binding peptide
VGRTPKVEYKFKVVNNAADLYLISIPE

SEQ ID NO: 128276 - protein, 27 aa, Artificial Sequence
  Cyclic GFR-binding peptide
VGRTPKVRHKRLYTVVGKDYYLISTAS

SEQ ID NO: 128277 - protein, 27 aa, Artificial Sequence
  Cyclic GFR-binding peptide
VGRTPKVRYKKLIKPTKGIFYLISIAN

SEQ ID NO: 128278 - protein, 27 aa, Artificial Sequence
  Cyclic GFR-binding peptide
VGRTPKVPIKGYVVKDYEDFYLMNIPS

SEQ ID NO: 128279 - protein, 27 aa, Artificial Sequence
  Cyclic GFR-binding peptide
VGRTPKVEYKFKVVNNASDLYLISIPE

SEQ ID NO: 128280 - protein, 27 aa, Artificial Sequence
  Cyclic GFR-binding peptide
VGRTPKVRYKKLVKPTRGVFYLISIAN

SEQ ID NO: 128281 - protein, 27 aa, Artificial Sequence
  Cyclic GFR-binding peptide
VGRTPKVRHKRLVVKENEDYYLMSTAS

SEQ ID NO: 128282 - protein, 27 aa, Artificial Sequence
  Cyclic GFR-binding peptide
VGRTPKVYHYKLIKPTKGIKYLISIPS

SEQ ID NO: 128283 - protein, 27 aa, Artificial Sequence
  Cyclic GFR-binding peptide
VGRTPKVYHYKLVVKENEDKYLMSIPS

SEQ ID NO: 128284 - protein, 27 aa, Artificial Sequence
  Cyclic GFR-binding peptide
VGRTPKVRHKRLIIQQKDNYYLMSTAS

SEQ ID NO: 128285 - protein, 27 aa, Artificial Sequence
  Cyclic GFR-binding peptide
VGRTPKVRYKKLVVKENEDFYLMSIAN

SEQ ID NO: 128286 - protein, 27 aa, Artificial Sequence
  Cyclic GFR-binding peptide
VGRTPKVRYKKLVVNNAADFYLISIAN

SEQ ID NO: 128287 - protein, 27 aa, Artificial Sequence
  Cyclic GFR-binding peptide
VGRTPKVEYKFKIIQQKDNLYLMSIPE

SEQ ID NO: 128288 - protein, 27 aa, Artificial Sequence
  Cyclic GFR-binding peptide
VGRTPKVRYKKLTPVGMDDFYLVSIAN

SEQ ID NO: 128289 - protein, 27 aa, Artificial Sequence
  Cyclic GFR-binding peptide
VGRTPKVYHYKLVVNNAADKYLISIPS

SEQ ID NO: 128290 - protein, 27 aa, Artificial Sequence
  Cyclic GFR-binding peptide
VGRTPKVPIKGYIVNNSSDFYLVNIPS

SEQ ID NO: 128291 - protein, 27 aa, Artificial Sequence
  Cyclic GFR-binding peptide
VGRTPKVPIKGYVKPKRGVFYLINIPS

SEQ ID NO: 128292 - protein, 27 aa, Artificial Sequence
  Cyclic GFR-binding peptide
VGRTPKVRYKKLIIQQKDNFYLMSIAN

SEQ ID NO: 128293 - protein, 27 aa, Artificial Sequence
  Cyclic GFR-binding peptide
VGRTPKVPIKGYIIQQKDNFYLMNIPS

SEQ ID NO: 128294 - protein, 27 aa, Artificial Sequence
  Cyclic GFR-binding peptide
VGRTPKVRYKKLIVNNSSDFYLVSIAN

SEQ ID NO: 128295 - protein, 27 aa, Artificial Sequence
  Cyclic GFR-binding peptide
VGRTPKVPIKGYVVNNAADFYLINIPS

SEQ ID NO: 128296 - protein, 27 aa, Artificial Sequence
  Cyclic GFR-binding peptide
VGRTPKVRHKRLVKPTRGVYYLISTAS

SEQ ID NO: 128297 - protein, 27 aa, Artificial Sequence
  Cyclic GFR-binding peptide
VGRTPKVEYKFKIVNNSSDLYLVSIPE

SEQ ID NO: 128298 - protein, 27 aa, Artificial Sequence
  Cyclic GFR-binding peptide
VGRTPKVRHKRLVVNNASDYYLISTAS

SEQ ID NO: 128299 - protein, 27 aa, Artificial Sequence
  Cyclic GFR-binding peptide
VGRTPKVRHKRLTPVGMDDYYLVSTAS

SEQ ID NO: 128300 - protein, 27 aa, Artificial Sequence
  Cyclic GFR-binding peptide
VGRTPKVYHYKLIVNNSSDKYLVSIPS

SEQ ID NO: 128301 - protein, 27 aa, Artificial Sequence
  Cyclic GFR-binding peptide
VGRTPKVYHYKLVVNNASDKYLISIPS

SEQ ID NO: 128302 - protein, 27 aa, Artificial Sequence
  Cyclic GFR-binding peptide
VGRTPKVEYKFKIVNSSDDLYLVSIPE

SEQ ID NO: 128303 - protein, 27 aa, Artificial Sequence
  Cyclic GFR-binding peptide
VGRTPKVEYKFKVKPKRGVLYLISIPE

SEQ ID NO: 128304 - protein, 27 aa, Artificial Sequence
  Cyclic GFR-binding peptide
VGRTPKVRHKRLVVKDYEDYYLMSTAS

SEQ ID NO: 128305 - protein, 27 aa, Artificial Sequence
  Cyclic GFR-binding peptide
VGRTPKVEYKFKVVKENEDLYLMSIPE

SEQ ID NO: 128306 - protein, 27 aa, Artificial Sequence
  Cyclic GFR-binding peptide
VGRTPKVEYKFKYTVVGKDLYLISIPE

SEQ ID NO: 128307 - protein, 27 aa, Artificial Sequence
  Cyclic GFR-binding peptide
VGRTPKVPIKGYVVNNASDFYLINIPS

SEQ ID NO: 128308 - protein, 27 aa, Artificial Sequence
  Cyclic GFR-binding peptide
VGRTPKVYHYKLIIQQKDNKYLMSIPS

SEQ ID NO: 128309 - protein, 27 aa, Artificial Sequence
  Cyclic GFR-binding peptide
VGRTPKVRYKKLVVNNASDFYLISIAN

SEQ ID NO: 128310 - protein, 27 aa, Artificial Sequence
  Cyclic GFR-binding peptide
VGRTPKVRHKRLVVNNAADYYLISTAS

SEQ ID NO: 128311 - protein, 27 aa, Artificial Sequence
  Cyclic GFR-binding peptide
EPISILYLVGRTPKVKFKYEVGRTPKV

SEQ ID NO: 128312 - protein, 27 aa, Artificial Sequence
  Cyclic GFR-binding peptide
SPISMLYKDEYDKVVLKYHYVGRTPKV

SEQ ID NO: 128313 - protein, 27 aa, Artificial Sequence
  Cyclic GFR-binding peptide
EPISVLYLDDMGVPTKFKYEVGRTPKV

SEQ ID NO: 128314 - protein, 27 aa, Artificial Sequence
  Cyclic GFR-binding peptide
NAISMLYFDEYDKVVLKKYRVGRTPKV

SEQ ID NO: 128315 - protein, 27 aa, Artificial Sequence
  Cyclic GFR-binding peptide
SATSILYYVGRKPKVLRKHRVGRTPKV

SEQ ID NO: 128316 - protein, 27 aa, Artificial Sequence
  Cyclic GFR-binding peptide
SPISILYKVGRKPKVLKYHYVGRTPKV

SEQ ID NO: 128317 - protein, 27 aa, Artificial Sequence
  Cyclic GFR-binding peptide
EPISILYLIGKTPKIKFKYEVGRTPKV

SEQ ID NO: 128318 - protein, 27 aa, Artificial Sequence
  Cyclic GFR-binding peptide
EPISILYLDENKNVVKFKYEVGRTPKV

SEQ ID NO: 128319 - protein, 27 aa, Artificial Sequence
  Cyclic GFR-binding peptide
SPINILYFVGRTPKVYGKIPVGRTPKV

SEQ ID NO: 128320 - protein, 27 aa, Artificial Sequence
  Cyclic GFR-binding peptide
SPINMLYFDENEKVVYGKIPVGRTPKV

SEQ ID NO: 128321 - protein, 27 aa, Artificial Sequence
  Cyclic GFR-binding peptide
SPISILYKDKGVVTYLKYHYVGRTPKV

SEQ ID NO: 128322 - protein, 27 aa, Artificial Sequence
  Cyclic GFR-binding peptide
EPISMLYLDNGRVLLKFKYEVGRTPKV

SEQ ID NO: 128323 - protein, 27 aa, Artificial Sequence
  Cyclic GFR-binding peptide
NAISILYFVGRKPKVLKKYRVGRTPKV

SEQ ID NO: 128324 - protein, 27 aa, Artificial Sequence
  Cyclic GFR-binding peptide
SPINVLYFDDMGVPTYGKIPVGRTPKV

SEQ ID NO: 128325 - protein, 27 aa, Artificial Sequence
  Cyclic GFR-binding peptide
SPISILYKDENKNVVLKYHYVGRTPKV

SEQ ID NO: 128326 - protein, 27 aa, Artificial Sequence
  Cyclic GFR-binding peptide
SPISVLYKDDSSNVILKYHYVGRTPKV

SEQ ID NO: 128327 - protein, 27 aa, Artificial Sequence
  Cyclic GFR-binding peptide
SPINVLYFDDSSNVIYGKIPVGRTPKV

SEQ ID NO: 128328 - protein, 27 aa, Artificial Sequence
  Cyclic GFR-binding peptide
NAISILYFDKGVVTYLKKYRVGRTPKV

SEQ ID NO: 128329 - protein, 27 aa, Artificial Sequence
  Cyclic GFR-binding peptide
SATSMLYYDNGRVLLLRKHRVGRTPKV

SEQ ID NO: 128330 - protein, 27 aa, Artificial Sequence
  Cyclic GFR-binding peptide
SPISMLYKDNGRVLLLKYHYVGRTPKV

SEQ ID NO: 128331 - protein, 27 aa, Artificial Sequence
  Cyclic GFR-binding peptide
NAISVLYFDDSSNVILKKYRVGRTPKV

SEQ ID NO: 128332 - protein, 27 aa, Artificial Sequence
  Cyclic GFR-binding peptide
SATSILYYDENKNVVLRKHRVGRTPKV

SEQ ID NO: 128333 - protein, 27 aa, Artificial Sequence
  Cyclic GFR-binding peptide
SATSILYYIGKTPKILRKHRVGRTPKV

SEQ ID NO: 128334 - protein, 27 aa, Artificial Sequence
  Cyclic GFR-binding peptide
SPINILYFDKGVVTYYGKIPVGRTPKV

SEQ ID NO: 128335 - protein, 27 aa, Artificial Sequence
  Cyclic GFR-binding peptide
SPISVLYKDDMGVPTLKYHYVGRTPKV

SEQ ID NO: 128336 - protein, 27 aa, Artificial Sequence
  Cyclic GFR-binding peptide
SATSVLYYDSSNNVILRKHRVGRTPKV

SEQ ID NO: 128337 - protein, 27 aa, Artificial Sequence
  Cyclic GFR-binding peptide
NAISMLYFDNGRVLLLKKYRVGRTPKV

SEQ ID NO: 128338 - protein, 27 aa, Artificial Sequence
  Cyclic GFR-binding peptide
SPISILYKVGRTPKVLKYHYVGRTPKV

SEQ ID NO: 128339 - protein, 27 aa, Artificial Sequence
  Cyclic GFR-binding peptide
SATSVLYYDDSSNVILRKHRVGRTPKV

SEQ ID NO: 128340 - protein, 27 aa, Artificial Sequence
  Cyclic GFR-binding peptide
SPINMLYFDNGRVLLYGKIPVGRTPKV

SEQ ID NO: 128341 - protein, 27 aa, Artificial Sequence
  Cyclic GFR-binding peptide
NAISILYFDENKNVVLKKYRVGRTPKV

SEQ ID NO: 128342 - protein, 27 aa, Artificial Sequence
  Cyclic GFR-binding peptide
EPISMLYLDEYDKVVKFKYEVGRTPKV

SEQ ID NO: 128343 - protein, 27 aa, Artificial Sequence
  Cyclic GFR-binding peptide
SPINILYFDENKNVVYGKIPVGRTPKV

SEQ ID NO: 128344 - protein, 27 aa, Artificial Sequence
  Cyclic GFR-binding peptide
SPINILYFIGKTPKIYGKIPVGRTPKV

SEQ ID NO: 128345 - protein, 27 aa, Artificial Sequence
  Cyclic GFR-binding peptide
EPISILYLDAANNVVKFKYEVGRTPKV

SEQ ID NO: 128346 - protein, 27 aa, Artificial Sequence
  Cyclic GFR-binding peptide
SATSILYYDKGVVTYLRKHRVGRTPKV

SEQ ID NO: 128347 - protein, 27 aa, Artificial Sequence
  Cyclic GFR-binding peptide
NAISILYFIGKTPKILKKYRVGRTPKV

SEQ ID NO: 128348 - protein, 27 aa, Artificial Sequence
  Cyclic GFR-binding peptide
SPINMLYFDEYDKVVYGKIPVGRTPKV

SEQ ID NO: 128349 - protein, 27 aa, Artificial Sequence
  Cyclic GFR-binding peptide
EPISILYLDSANNVVKFKYEVGRTPKV

SEQ ID NO: 128350 - protein, 27 aa, Artificial Sequence
  Cyclic GFR-binding peptide
NAISILYFVGRTPKVLKKYRVGRTPKV

SEQ ID NO: 128351 - protein, 27 aa, Artificial Sequence
  Cyclic GFR-binding peptide
SATSMLYYDENEKVVLRKHRVGRTPKV

SEQ ID NO: 128352 - protein, 27 aa, Artificial Sequence
  Cyclic GFR-binding peptide
SPISILYKIGKTPKILKYHYVGRTPKV

SEQ ID NO: 128353 - protein, 27 aa, Artificial Sequence
  Cyclic GFR-binding peptide
SPISMLYKDENEKVVLKYHYVGRTPKV

SEQ ID NO: 128354 - protein, 27 aa, Artificial Sequence
  Cyclic GFR-binding peptide
SATSMLYYNDKQQIILRKHRVGRTPKV

SEQ ID NO: 128355 - protein, 27 aa, Artificial Sequence
  Cyclic GFR-binding peptide
NAISMLYFDENEKVVLKKYRVGRTPKV

SEQ ID NO: 128356 - protein, 27 aa, Artificial Sequence
  Cyclic GFR-binding peptide
NAISILYFDAANNVVLKKYRVGRTPKV

SEQ ID NO: 128357 - protein, 27 aa, Artificial Sequence
  Cyclic GFR-binding peptide
EPISMLYLNDKQQIIKFKYEVGRTPKV

SEQ ID NO: 128358 - protein, 27 aa, Artificial Sequence
  Cyclic GFR-binding peptide
NAISVLYFDDMGVPTLKKYRVGRTPKV

SEQ ID NO: 128359 - protein, 27 aa, Artificial Sequence
  Cyclic GFR-binding peptide
SPISILYKDAANNVVLKYHYVGRTPKV

SEQ ID NO: 128360 - protein, 27 aa, Artificial Sequence
  Cyclic GFR-binding peptide
SPINVLYFDSSNNVIYGKIPVGRTPKV

SEQ ID NO: 128361 - protein, 27 aa, Artificial Sequence
  Cyclic GFR-binding peptide
SPINILYFVGRKPKVYGKIPVGRTPKV

SEQ ID NO: 128362 - protein, 27 aa, Artificial Sequence
  Cyclic GFR-binding peptide
NAISMLYFNDKQQIILKKYRVGRTPKV

SEQ ID NO: 128363 - protein, 27 aa, Artificial Sequence
  Cyclic GFR-binding peptide
SPINMLYFNDKQQIIYGKIPVGRTPKV

SEQ ID NO: 128364 - protein, 27 aa, Artificial Sequence
  Cyclic GFR-binding peptide
NAISVLYFDSSNNVILKKYRVGRTPKV

SEQ ID NO: 128365 - protein, 27 aa, Artificial Sequence
  Cyclic GFR-binding peptide
SPINILYFDAANNVVYGKIPVGRTPKV

SEQ ID NO: 128366 - protein, 27 aa, Artificial Sequence
  Cyclic GFR-binding peptide
SATSILYYVGRTPKVLRKHRVGRTPKV

SEQ ID NO: 128367 - protein, 27 aa, Artificial Sequence
  Cyclic GFR-binding peptide
EPISVLYLDSSNNVIKFKYEVGRTPKV

SEQ ID NO: 128368 - protein, 27 aa, Artificial Sequence
  Cyclic GFR-binding peptide
SATSILYYDSANNVVLRKHRVGRTPKV

SEQ ID NO: 128369 - protein, 27 aa, Artificial Sequence
  Cyclic GFR-binding peptide
SATSVLYYDDMGVPTLRKHRVGRTPKV

SEQ ID NO: 128370 - protein, 27 aa, Artificial Sequence
  Cyclic GFR-binding peptide
SPISVLYKDSSNNVILKYHYVGRTPKV

SEQ ID NO: 128371 - protein, 27 aa, Artificial Sequence
  Cyclic GFR-binding peptide
SPISILYKDSANNVVLKYHYVGRTPKV

SEQ ID NO: 128372 - protein, 27 aa, Artificial Sequence
  Cyclic GFR-binding peptide
EPISVLYLDDSSNVIKFKYEVGRTPKV

SEQ ID NO: 128373 - protein, 27 aa, Artificial Sequence
  Cyclic GFR-binding peptide
EPISILYLVGRKPKVKFKYEVGRTPKV

SEQ ID NO: 128374 - protein, 27 aa, Artificial Sequence
  Cyclic GFR-binding peptide
SATSMLYYDEYDKVVLRKHRVGRTPKV

SEQ ID NO: 128375 - protein, 27 aa, Artificial Sequence
  Cyclic GFR-binding peptide
EPISMLYLDENEKVVKFKYEVGRTPKV

SEQ ID NO: 128376 - protein, 27 aa, Artificial Sequence
  Cyclic GFR-binding peptide
EPISILYLDKGVVTYKFKYEVGRTPKV

SEQ ID NO: 128377 - protein, 27 aa, Artificial Sequence
  Cyclic GFR-binding peptide
SPINILYFDSANNVVYGKIPVGRTPKV

SEQ ID NO: 128378 - protein, 27 aa, Artificial Sequence
  Cyclic GFR-binding peptide
SPISMLYKNDKQQIILKYHYVGRTPKV

SEQ ID NO: 128379 - protein, 27 aa, Artificial Sequence
  Cyclic GFR-binding peptide
NAISILYFDSANNVVLKKYRVGRTPKV

SEQ ID NO: 128380 - protein, 27 aa, Artificial Sequence
  Cyclic GFR-binding peptide
SATSILYYDAANNVVLRKHRVGRTPKV

SEQ ID NO: 128381 - protein, 27 aa, Artificial Sequence
  Cyclic GFR-binding peptide
VGRTPKVSMEGIIIQQKDNMIQMTINS

SEQ ID NO: 128382 - protein, 27 aa, Artificial Sequence
  Cyclic GFR-binding peptide
VGRTPKVSMEGIIVNSSDDMIQVTINS

SEQ ID NO: 128383 - protein, 27 aa, Artificial Sequence
  Cyclic GFR-binding peptide
VGRTPKVSMEGLVKPKRGVMIQITINS

SEQ ID NO: 128384 - protein, 27 aa, Artificial Sequence
  Cyclic GFR-binding peptide
VGRTPKVSMEGLVVNNASDMIQITINS

SEQ ID NO: 128385 - protein, 29 aa, Artificial Sequence
  Cyclic GFR-binding peptide
VGRTPKVSMEGIFIPKKRVIEMIQVTINS

SEQ ID NO: 128386 - protein, 27 aa, Artificial Sequence
  Cyclic GFR-binding peptide
VGRTPKVSMEGILLVRGNDMIQMTINS

SEQ ID NO: 128387 - protein, 29 aa, Artificial Sequence
  Cyclic GFR-binding peptide
VGRTPKVSMEGILKPKKRVYEMIQVTINS

SEQ ID NO: 128388 - protein, 27 aa, Artificial Sequence
  Cyclic GFR-binding peptide
VGRTPKVSMEGLIKPTKGIMIQITINS

SEQ ID NO: 128389 - protein, 27 aa, Artificial Sequence
  Cyclic GFR-binding peptide
VGRTPKVSMEGLIVNSSDDMIQVTINS

SEQ ID NO: 128390 - protein, 29 aa, Artificial Sequence
  Cyclic GFR-binding peptide
VGRTPKVSMEGIHQGQHPKIRMIQMTINS

SEQ ID NO: 128391 - protein, 27 aa, Artificial Sequence
  Cyclic GFR-binding peptide
VGRTPKVSMEGIVVNNASDMIQITINS

SEQ ID NO: 128392 - protein, 29 aa, Artificial Sequence
  Cyclic GFR-binding peptide
VGRTPKVSMEGLLKPKKRVYEMIQVTINS

SEQ ID NO: 128393 - protein, 27 aa, Artificial Sequence
  Cyclic GFR-binding peptide
VGRTPKVSMEGIVKPKRGVMIQITINS

SEQ ID NO: 128394 - protein, 27 aa, Artificial Sequence
  Cyclic GFR-binding peptide
VGRTPKVSMEGIVKPTRGVMIQITINS

SEQ ID NO: 128395 - protein, 27 aa, Artificial Sequence
  Cyclic GFR-binding peptide
VGRTPKVSMEGLVVNNAADMIQITINS

SEQ ID NO: 128396 - protein, 27 aa, Artificial Sequence
  Cyclic GFR-binding peptide
VGRTPKVSMEGLLLVRGNDMIQMTINS

SEQ ID NO: 128397 - protein, 27 aa, Artificial Sequence
  Cyclic GFR-binding peptide
VGRTPKVSMEGIIKPTKGIMIQITINS

SEQ ID NO: 128398 - protein, 27 aa, Artificial Sequence
  Cyclic GFR-binding peptide
VGRTPKVSMEGLIIQQKDNMIQMTINS

SEQ ID NO: 128399 - protein, 29 aa, Artificial Sequence
  Cyclic GFR-binding peptide
VGRTPKVSMEGLHQGQHPKIRMIQMTINS

SEQ ID NO: 128400 - protein, 27 aa, Artificial Sequence
  Cyclic GFR-binding peptide
VGRTPKVSMEGIVVNNAADMIQITINS

SEQ ID NO: 128401 - protein, 29 aa, Artificial Sequence
  Cyclic GFR-binding peptide
VGRTPKVSMEGLFIPKKRVIEMIQVTINS

SEQ ID NO: 128402 - protein, 27 aa, Artificial Sequence
  Cyclic GFR-binding peptide
VGRTPKVSMEGLVKPTRGVMIQITINS

SEQ ID NO: 128403 - protein, 27 aa, Artificial Sequence
  Cyclic GFR-binding peptide
SNITMQIMNDKQQIIIGEMSVGRTPKV

SEQ ID NO: 128404 - protein, 27 aa, Artificial Sequence
  Cyclic GFR-binding peptide
SNITVQIMDDSSNVIIGEMSVGRTPKV

SEQ ID NO: 128405 - protein, 27 aa, Artificial Sequence
  Cyclic GFR-binding peptide
SNITIQIMVGRKPKVLGEMSVGRTPKV

SEQ ID NO: 128406 - protein, 27 aa, Artificial Sequence
  Cyclic GFR-binding peptide
SNITIQIMDSANNVVLGEMSVGRTPKV

SEQ ID NO: 128407 - protein, 29 aa, Artificial Sequence
  Cyclic GFR-binding peptide
SNITVQIMEIVRKKPIFIGEMSVGRTPKV

SEQ ID NO: 128408 - protein, 27 aa, Artificial Sequence
  Cyclic GFR-binding peptide
SNITMQIMDNGRVLLIGEMSVGRTPKV

SEQ ID NO: 128409 - protein, 29 aa, Artificial Sequence
  Cyclic GFR-binding peptide
SNITVQIMEYVRKKPKLIGEMSVGRTPKV

SEQ ID NO: 128410 - protein, 27 aa, Artificial Sequence
  Cyclic GFR-binding peptide
SNITIQIMIGKTPKILGEMSVGRTPKV

SEQ ID NO: 128411 - protein, 27 aa, Artificial Sequence
  Cyclic GFR-binding peptide
SNITVQIMDDSSNVILGEMSVGRTPKV

SEQ ID NO: 128412 - protein, 29 aa, Artificial Sequence
  Cyclic GFR-binding peptide
SNITMQIMRIKPHQGQHIGEMSVGRTPKV

SEQ ID NO: 128413 - protein, 27 aa, Artificial Sequence
  Cyclic GFR-binding peptide
SNITIQIMDSANNVVIGEMSVGRTPKV

SEQ ID NO: 128414 - protein, 29 aa, Artificial Sequence
  Cyclic GFR-binding peptide
SNITVQIMEYVRKKPKLLGEMSVGRTPKV

SEQ ID NO: 128415 - protein, 27 aa, Artificial Sequence
  Cyclic GFR-binding peptide
SNITIQIMVGRKPKVIGEMSVGRTPKV

SEQ ID NO: 128416 - protein, 27 aa, Artificial Sequence
  Cyclic GFR-binding peptide
SNITIQIMVGRTPKVIGEMSVGRTPKV

SEQ ID NO: 128417 - protein, 27 aa, Artificial Sequence
  Cyclic GFR-binding peptide
SNITIQIMDAANNVVLGEMSVGRTPKV

SEQ ID NO: 128418 - protein, 27 aa, Artificial Sequence
  Cyclic GFR-binding peptide
SNITMQIMDNGRVLLLGEMSVGRTPKV

SEQ ID NO: 128419 - protein, 27 aa, Artificial Sequence
  Cyclic GFR-binding peptide
SNITIQIMIGKTPKIIGEMSVGRTPKV

SEQ ID NO: 128420 - protein, 27 aa, Artificial Sequence
  Cyclic GFR-binding peptide
SNITMQIMNDKQQIILGEMSVGRTPKV

SEQ ID NO: 128421 - protein, 29 aa, Artificial Sequence
  Cyclic GFR-binding peptide
SNITMQIMRIKPHQGQHLGEMSVGRTPKV

SEQ ID NO: 128422 - protein, 27 aa, Artificial Sequence
  Cyclic GFR-binding peptide
SNITIQIMDAANNVVIGEMSVGRTPKV

SEQ ID NO: 128423 - protein, 29 aa, Artificial Sequence
  Cyclic GFR-binding peptide
SNITVQIMEIVRKKPIFLGEMSVGRTPKV

SEQ ID NO: 128424 - protein, 27 aa, Artificial Sequence
  Cyclic GFR-binding peptide
SNITIQIMVGRTPKVLGEMSVGRTPKV

SEQ ID NO: 128425 - protein, 27 aa, Artificial Sequence
  Cyclic GFR-binding peptide
VGRTPKVRYKKLIKPTKGIFYLISIAN

SEQ ID NO: 128426 - protein, 27 aa, Artificial Sequence
  Cyclic GFR-binding peptide
VGRTPKVQYNKLVVNKNEDLYLISIAS

SEQ ID NO: 128427 - protein, 27 aa, Artificial Sequence
  Cyclic GFR-binding peptide
VGRTPKVQYNKLVVNNAADLYLISIAS

SEQ ID NO: 128428 - protein, 27 aa, Artificial Sequence
  Cyclic GFR-binding peptide
VGRTPKVQYNKLIVNNSSDLYLVSIAS

SEQ ID NO: 128429 - protein, 27 aa, Artificial Sequence
  Cyclic GFR-binding peptide
VGRTPKVRYKKLVVKDYEDFYLMSIAN

SEQ ID NO: 128430 - protein, 27 aa, Artificial Sequence
  Cyclic GFR-binding peptide
VGRTPKVRYKKLVKPTRGVFYLISIAN

SEQ ID NO: 128431 - protein, 27 aa, Artificial Sequence
  Cyclic GFR-binding peptide
VGRTPKVQYNKLIIQQKDNLYLMSIAS

SEQ ID NO: 128432 - protein, 27 aa, Artificial Sequence
  Cyclic GFR-binding peptide
VGRTPKVQYNKLLLVRGNDLYLMSIAS

SEQ ID NO: 128433 - protein, 27 aa, Artificial Sequence
  Cyclic GFR-binding peptide
VGRTPKVQYNKLVKPTRGVLYLISIAS

SEQ ID NO: 128434 - protein, 27 aa, Artificial Sequence
  Cyclic GFR-binding peptide
VGRTPKVRYKKLVVKENEDFYLMSIAN

SEQ ID NO: 128435 - protein, 27 aa, Artificial Sequence
  Cyclic GFR-binding peptide
VGRTPKVRYKKLVVNNAADFYLISIAN

SEQ ID NO: 128436 - protein, 27 aa, Artificial Sequence
  Cyclic GFR-binding peptide
VGRTPKVQYNKLTPVGMDDLYLVSIAS

SEQ ID NO: 128437 - protein, 27 aa, Artificial Sequence
  Cyclic GFR-binding peptide
VGRTPKVRYKKLTPVGMDDFYLVSIAN

SEQ ID NO: 128438 - protein, 27 aa, Artificial Sequence
  Cyclic GFR-binding peptide
VGRTPKVRYKKLVKPKRGVFYLISIAN

SEQ ID NO: 128439 - protein, 27 aa, Artificial Sequence
  Cyclic GFR-binding peptide
VGRTPKVQYNKLVVKENEDLYLMSIAS

SEQ ID NO: 128440 - protein, 27 aa, Artificial Sequence
  Cyclic GFR-binding peptide
VGRTPKVRYKKLIIQQKDNFYLMSIAN

SEQ ID NO: 128441 - protein, 27 aa, Artificial Sequence
  Cyclic GFR-binding peptide
VGRTPKVQYNKLVKPKRGVLYLISIAS

SEQ ID NO: 128442 - protein, 27 aa, Artificial Sequence
  Cyclic GFR-binding peptide
VGRTPKVRYKKLIVNNSSDFYLVSIAN

SEQ ID NO: 128443 - protein, 27 aa, Artificial Sequence
  Cyclic GFR-binding peptide
VGRTPKVRYKKLYTVVGKDFYLISIAN

SEQ ID NO: 128444 - protein, 27 aa, Artificial Sequence
  Cyclic GFR-binding peptide
VGRTPKVRYKKLIVNSSDDFYLVSIAN

SEQ ID NO: 128445 - protein, 27 aa, Artificial Sequence
  Cyclic GFR-binding peptide
VGRTPKVRYKKLLLVRGNDFYLMSIAN

SEQ ID NO: 128446 - protein, 27 aa, Artificial Sequence
  Cyclic GFR-binding peptide
VGRTPKVQYNKLVVNNASDLYLISIAS

SEQ ID NO: 128447 - protein, 27 aa, Artificial Sequence
  Cyclic GFR-binding peptide
VGRTPKVQYNKLIKPTKGILYLISIAS

SEQ ID NO: 128448 - protein, 27 aa, Artificial Sequence
  Cyclic GFR-binding peptide
VGRTPKVRYKKLVVNKNEDFYLISIAN

SEQ ID NO: 128449 - protein, 27 aa, Artificial Sequence
  Cyclic GFR-binding peptide
VGRTPKVQYNKLYTVVGKDLYLISIAS

SEQ ID NO: 128450 - protein, 27 aa, Artificial Sequence
  Cyclic GFR-binding peptide
VGRTPKVQYNKLVVKDYEDLYLMSIAS

SEQ ID NO: 128451 - protein, 27 aa, Artificial Sequence
  Cyclic GFR-binding peptide
VGRTPKVRYKKLVVNNASDFYLISIAN

SEQ ID NO: 128452 - protein, 27 aa, Artificial Sequence
  Cyclic GFR-binding peptide
VGRTPKVQYNKLIVNSSDDLYLVSIAS

SEQ ID NO: 128453 - protein, 27 aa, Artificial Sequence
  Cyclic GFR-binding peptide
NAISILYFIGKTPKILKKYRVGRTPKV

SEQ ID NO: 128454 - protein, 27 aa, Artificial Sequence
  Cyclic GFR-binding peptide
SAISILYLDENKNVVLKNYQVGRTPKV

SEQ ID NO: 128455 - protein, 27 aa, Artificial Sequence
  Cyclic GFR-binding peptide
SAISILYLDAANNVVLKNYQVGRTPKV

SEQ ID NO: 128456 - protein, 27 aa, Artificial Sequence
  Cyclic GFR-binding peptide
SAISVLYLDSSNNVILKNYQVGRTPKV

SEQ ID NO: 128457 - protein, 27 aa, Artificial Sequence
  Cyclic GFR-binding peptide
NAISMLYFDEYDKVVLKKYRVGRTPKV

SEQ ID NO: 128458 - protein, 27 aa, Artificial Sequence
  Cyclic GFR-binding peptide
NAISILYFVGRTPKVLKKYRVGRTPKV

SEQ ID NO: 128459 - protein, 27 aa, Artificial Sequence
  Cyclic GFR-binding peptide
SAISMLYLNDKQQIILKNYQVGRTPKV

SEQ ID NO: 128460 - protein, 27 aa, Artificial Sequence
  Cyclic GFR-binding peptide
SAISMLYLDNGRVLLLKNYQVGRTPKV

SEQ ID NO: 128461 - protein, 27 aa, Artificial Sequence
  Cyclic GFR-binding peptide
SAISILYLVGRTPKVLKNYQVGRTPKV

SEQ ID NO: 128462 - protein, 27 aa, Artificial Sequence
  Cyclic GFR-binding peptide
NAISMLYFDENEKVVLKKYRVGRTPKV

SEQ ID NO: 128463 - protein, 27 aa, Artificial Sequence
  Cyclic GFR-binding peptide
NAISILYFDAANNVVLKKYRVGRTPKV

SEQ ID NO: 128464 - protein, 27 aa, Artificial Sequence
  Cyclic GFR-binding peptide
SAISVLYLDDMGVPTLKNYQVGRTPKV

SEQ ID NO: 128465 - protein, 27 aa, Artificial Sequence
  Cyclic GFR-binding peptide
NAISVLYFDDMGVPTLKKYRVGRTPKV

SEQ ID NO: 128466 - protein, 27 aa, Artificial Sequence
  Cyclic GFR-binding peptide
NAISILYFVGRKPKVLKKYRVGRTPKV

SEQ ID NO: 128467 - protein, 27 aa, Artificial Sequence
  Cyclic GFR-binding peptide
SAISMLYLDENEKVVLKNYQVGRTPKV

SEQ ID NO: 128468 - protein, 27 aa, Artificial Sequence
  Cyclic GFR-binding peptide
NAISMLYFNDKQQIILKKYRVGRTPKV

SEQ ID NO: 128469 - protein, 27 aa, Artificial Sequence
  Cyclic GFR-binding peptide
SAISILYLVGRKPKVLKNYQVGRTPKV

SEQ ID NO: 128470 - protein, 27 aa, Artificial Sequence
  Cyclic GFR-binding peptide
NAISVLYFDSSNNVILKKYRVGRTPKV

SEQ ID NO: 128471 - protein, 27 aa, Artificial Sequence
  Cyclic GFR-binding peptide
NAISILYFDKGVVTYLKKYRVGRTPKV

SEQ ID NO: 128472 - protein, 27 aa, Artificial Sequence
  Cyclic GFR-binding peptide
NAISVLYFDDSSNVILKKYRVGRTPKV

SEQ ID NO: 128473 - protein, 27 aa, Artificial Sequence
  Cyclic GFR-binding peptide
NAISMLYFDNGRVLLLKKYRVGRTPKV

SEQ ID NO: 128474 - protein, 27 aa, Artificial Sequence
  Cyclic GFR-binding peptide
SAISILYLDSANNVVLKNYQVGRTPKV

SEQ ID NO: 128475 - protein, 27 aa, Artificial Sequence
  Cyclic GFR-binding peptide
SAISILYLIGKTPKILKNYQVGRTPKV

SEQ ID NO: 128476 - protein, 27 aa, Artificial Sequence
  Cyclic GFR-binding peptide
NAISILYFDENKNVVLKKYRVGRTPKV

SEQ ID NO: 128477 - protein, 27 aa, Artificial Sequence
  Cyclic GFR-binding peptide
SAISILYLDKGVVTYLKNYQVGRTPKV

SEQ ID NO: 128478 - protein, 27 aa, Artificial Sequence
  Cyclic GFR-binding peptide
SAISMLYLDEYDKVVLKNYQVGRTPKV

SEQ ID NO: 128479 - protein, 27 aa, Artificial Sequence
  Cyclic GFR-binding peptide
NAISILYFDSANNVVLKKYRVGRTPKV

SEQ ID NO: 128480 - protein, 27 aa, Artificial Sequence
  Cyclic GFR-binding peptide
SAISVLYLDDSSNVILKNYQVGRTPKV

SEQ ID NO: 128481 - protein, 29 aa, Artificial Sequence
  Cyclic GFR-binding peptide
VGRTPKVVTAKKLKPKKRVYEIKRVQVPR

SEQ ID NO: 128482 - protein, 29 aa, Artificial Sequence
  Cyclic GFR-binding peptide
VGRTPKVVQVEKLKPKKRVYEVKAVKVSR

SEQ ID NO: 128483 - protein, 27 aa, Artificial Sequence
  Cyclic GFR-binding peptide
VGRTPKVVTAKKVKPTRGVIKRIQVPR

SEQ ID NO: 128484 - protein, 29 aa, Artificial Sequence
  Cyclic GFR-binding peptide
VGRTPKVVQVEKFIPKKRVIEVKAVKVSR

SEQ ID NO: 128485 - protein, 29 aa, Artificial Sequence
  Cyclic GFR-binding peptide
VGRTPKVVQVEKHQGQHPKIRVKAMKVSR

SEQ ID NO: 128486 - protein, 29 aa, Artificial Sequence
  Cyclic GFR-binding peptide
VGRTPKVVTAKKHQGQHPKIRIKRMQVPR

SEQ ID NO: 128487 - protein, 27 aa, Artificial Sequence
  Cyclic GFR-binding peptide
VGRTPKVVTAKKIKPTKGIIKRIQVPR

SEQ ID NO: 128488 - protein, 27 aa, Artificial Sequence
  Cyclic GFR-binding peptide
VGRTPKVVQVEKVKPKRGVVKAIKVSR

SEQ ID NO: 128489 - protein, 27 aa, Artificial Sequence
  Cyclic GFR-binding peptide
VGRTPKVVTAKKVKPKRGVIKRIQVPR

SEQ ID NO: 128490 - protein, 27 aa, Artificial Sequence
  Cyclic GFR-binding peptide
VGRTPKVVQVEKIKPTKGIVKAIKVSR

SEQ ID NO: 128491 - protein, 27 aa, Artificial Sequence
  Cyclic GFR-binding peptide
VGRTPKVVQVEKVKPTRGVVKAIKVSR

SEQ ID NO: 128492 - protein, 29 aa, Artificial Sequence
  Cyclic GFR-binding peptide
VGRTPKVVTAKKFIPKKRVIEIKRVQVPR

SEQ ID NO: 128493 - protein, 29 aa, Artificial Sequence
  Cyclic GFR-binding peptide
RPVQVRKIEYVRKKPKLKKATVVGRTPKV

SEQ ID NO: 128494 - protein, 29 aa, Artificial Sequence
  Cyclic GFR-binding peptide
RSVKVAKVEYVRKKPKLKEVQVVGRTPKV

SEQ ID NO: 128495 - protein, 27 aa, Artificial Sequence
  Cyclic GFR-binding peptide
RPVQIRKIVGRTPKVKKATVVGRTPKV

SEQ ID NO: 128496 - protein, 29 aa, Artificial Sequence
  Cyclic GFR-binding peptide
RSVKVAKVEIVRKKPIFKEVQVVGRTPKV

SEQ ID NO: 128497 - protein, 29 aa, Artificial Sequence
  Cyclic GFR-binding peptide
RSVKMAKVRIKPHQGQHKEVQVVGRTPKV

SEQ ID NO: 128498 - protein, 29 aa, Artificial Sequence
  Cyclic GFR-binding peptide
RPVQMRKIRIKPHQGQHKKATVVGRTPKV

SEQ ID NO: 128499 - protein, 27 aa, Artificial Sequence
  Cyclic GFR-binding peptide
RPVQIRKIIGKTPKIKKATVVGRTPKV

SEQ ID NO: 128500 - protein, 27 aa, Artificial Sequence
  Cyclic GFR-binding peptide
RSVKIAKVVGRKPKVKEVQVVGRTPKV

SEQ ID NO: 128501 - protein, 27 aa, Artificial Sequence
  Cyclic GFR-binding peptide
RPVQIRKIVGRKPKVKKATVVGRTPKV

SEQ ID NO: 128502 - protein, 27 aa, Artificial Sequence
  Cyclic GFR-binding peptide
RSVKIAKVIGKTPKIKEVQVVGRTPKV

SEQ ID NO: 128503 - protein, 27 aa, Artificial Sequence
  Cyclic GFR-binding peptide
RSVKIAKVVGRTPKVKEVQVVGRTPKV

SEQ ID NO: 128504 - protein, 29 aa, Artificial Sequence
  Cyclic GFR-binding peptide
RPVQVRKIEIVRKKPIFKKATVVGRTPKV

SEQ ID NO: 128505 - protein, 29 aa, Artificial Sequence
  Cyclic GFR-binding peptide
RIKPHQGQHRYKKLIKPTKGIFYLISIAN

SEQ ID NO: 128506 - protein, 31 aa, Artificial Sequence
  Cyclic GFR-binding peptide
RIKPHQGQHRHKRLFIPKKRVIEYYLVSTAS

SEQ ID NO: 128507 - protein, 29 aa, Artificial Sequence
  Cyclic GFR-binding peptide
RIKPHQGQHYHYKLVVKDYEDKYLMSIPS

SEQ ID NO: 128508 - protein, 29 aa, Artificial Sequence
  Cyclic GFR-binding peptide
RIKPHQGQHQYNKLIVNNSSDLYLVSIAS

SEQ ID NO: 128509 - protein, 29 aa, Artificial Sequence
  Cyclic GFR-binding peptide
RIKPHQGQHRYKKLVVKDYEDFYLMSIAN

SEQ ID NO: 128510 - protein, 29 aa, Artificial Sequence
  Cyclic GFR-binding peptide
RIKPHQGQHRYKKLVKPTRGVFYLISIAN

SEQ ID NO: 128511 - protein, 29 aa, Artificial Sequence
  Cyclic GFR-binding peptide
RIKPHQGQHRHKRLVVKENEDYYLMSTAS

SEQ ID NO: 128512 - protein, 29 aa, Artificial Sequence
  Cyclic GFR-binding peptide
RIKPHQGQHYHYKLIKPTKGIKYLISIPS

SEQ ID NO: 128513 - protein, 31 aa, Artificial Sequence
  Cyclic GFR-binding peptide
RIKPHQGQHRYKKLFIPKKRVIEFYLVSIAN

SEQ ID NO: 128514 - protein, 29 aa, Artificial Sequence
  Cyclic GFR-binding peptide
RIKPHQGQHYHYKLVVKENEDKYLMSIPS

SEQ ID NO: 128515 - protein, 29 aa, Artificial Sequence
  Cyclic GFR-binding peptide
RIKPHQGQHRHKRLVKPKRGVYYLISTAS

SEQ ID NO: 128516 - protein, 29 aa, Artificial Sequence
  Cyclic GFR-binding peptide
RIKPHQGQHYHYKLVKPKRGVKYLISIPS

SEQ ID NO: 128517 - protein, 31 aa, Artificial Sequence
  Cyclic GFR-binding peptide
RIKPHQGQHQYNKLFIPKKRVIELYLVSIAS

SEQ ID NO: 128518 - protein, 29 aa, Artificial Sequence
  Cyclic GFR-binding peptide
RIKPHQGQHQYNKLVKPTRGVLYLISIAS

SEQ ID NO: 128519 - protein, 29 aa, Artificial Sequence
  Cyclic GFR-binding peptide
RIKPHQGQHRYKKLVVKENEDFYLMSIAN

SEQ ID NO: 128520 - protein, 29 aa, Artificial Sequence
  Cyclic GFR-binding peptide
RIKPHQGQHQYNKLTPVGMDDLYLVSIAS

SEQ ID NO: 128521 - protein, 29 aa, Artificial Sequence
  Cyclic GFR-binding peptide
RIKPHQGQHRYKKLTPVGMDDFYLVSIAN

SEQ ID NO: 128522 - protein, 29 aa, Artificial Sequence
  Cyclic GFR-binding peptide
RIKPHQGQHRYKKLVKPKRGVFYLISIAN

SEQ ID NO: 128523 - protein, 29 aa, Artificial Sequence
  Cyclic GFR-binding peptide
RIKPHQGQHQYNKLVVKENEDLYLMSIAS

SEQ ID NO: 128524 - protein, 29 aa, Artificial Sequence
  Cyclic GFR-binding peptide
RIKPHQGQHYHYKLIVNSSDDKYLVSIPS

SEQ ID NO: 128525 - protein, 29 aa, Artificial Sequence
  Cyclic GFR-binding peptide
RIKPHQGQHQYNKLVKPKRGVLYLISIAS

SEQ ID NO: 128526 - protein, 29 aa, Artificial Sequence
  Cyclic GFR-binding peptide
RIKPHQGQHRYKKLIVNNSSDFYLVSIAN

SEQ ID NO: 128527 - protein, 29 aa, Artificial Sequence
  Cyclic GFR-binding peptide
RIKPHQGQHRYKKLIVNSSDDFYLVSIAN

SEQ ID NO: 128528 - protein, 29 aa, Artificial Sequence
  Cyclic GFR-binding peptide
RIKPHQGQHRHKRLVKPTRGVYYLISTAS

SEQ ID NO: 128529 - protein, 31 aa, Artificial Sequence
  Cyclic GFR-binding peptide
RIKPHQGQHYHYKLFIPKKRVIEKYLVSIPS

SEQ ID NO: 128530 - protein, 29 aa, Artificial Sequence
  Cyclic GFR-binding peptide
RIKPHQGQHRHKRLIKPTKGIYYLISTAS

SEQ ID NO: 128531 - protein, 29 aa, Artificial Sequence
  Cyclic GFR-binding peptide
RIKPHQGQHRHKRLTPVGMDDYYLVSTAS

SEQ ID NO: 128532 - protein, 29 aa, Artificial Sequence
  Cyclic GFR-binding peptide
RIKPHQGQHYHYKLTPVGMDDKYLVSIPS

SEQ ID NO: 128533 - protein, 29 aa, Artificial Sequence
  Cyclic GFR-binding peptide
RIKPHQGQHYHYKLIVNNSSDKYLVSIPS

SEQ ID NO: 128534 - protein, 29 aa, Artificial Sequence
  Cyclic GFR-binding peptide
RIKPHQGQHRHKRLIVNNSSDYYLVSTAS

SEQ ID NO: 128535 - protein, 29 aa, Artificial Sequence
  Cyclic GFR-binding peptide
RIKPHQGQHYHYKLVKPTRGVKYLISIPS

SEQ ID NO: 128536 - protein, 29 aa, Artificial Sequence
  Cyclic GFR-binding peptide
RIKPHQGQHRHKRLIVNSSDDYYLVSTAS

SEQ ID NO: 128537 - protein, 29 aa, Artificial Sequence
  Cyclic GFR-binding peptide
RIKPHQGQHRHKRLVVKDYEDYYLMSTAS

SEQ ID NO: 128538 - protein, 29 aa, Artificial Sequence
  Cyclic GFR-binding peptide
RIKPHQGQHQYNKLIKPTKGILYLISIAS

SEQ ID NO: 128539 - protein, 29 aa, Artificial Sequence
  Cyclic GFR-binding peptide
RIKPHQGQHQYNKLVVKDYEDLYLMSIAS

SEQ ID NO: 128540 - protein, 29 aa, Artificial Sequence
  Cyclic GFR-binding peptide
RIKPHQGQHQYNKLIVNSSDDLYLVSIAS

SEQ ID NO: 128541 - protein, 29 aa, Artificial Sequence
  Cyclic GFR-binding peptide
NAISILYFIGKTPKILKKYRRIKPHQGQH

SEQ ID NO: 128542 - protein, 31 aa, Artificial Sequence
  Cyclic GFR-binding peptide
SATSVLYYEIVRKKPIFLRKHRRIKPHQGQH

SEQ ID NO: 128543 - protein, 29 aa, Artificial Sequence
  Cyclic GFR-binding peptide
SPISMLYKDEYDKVVLKYHYRIKPHQGQH

SEQ ID NO: 128544 - protein, 29 aa, Artificial Sequence
  Cyclic GFR-binding peptide
SAISVLYLDSSNNVILKNYQRIKPHQGQH

SEQ ID NO: 128545 - protein, 29 aa, Artificial Sequence
  Cyclic GFR-binding peptide
NAISMLYFDEYDKVVLKKYRRIKPHQGQH

SEQ ID NO: 128546 - protein, 29 aa, Artificial Sequence
  Cyclic GFR-binding peptide
NAISILYFVGRTPKVLKKYRRIKPHQGQH

SEQ ID NO: 128547 - protein, 29 aa, Artificial Sequence
  Cyclic GFR-binding peptide
SATSMLYYDENEKVVLRKHRRIKPHQGQH

SEQ ID NO: 128548 - protein, 29 aa, Artificial Sequence
  Cyclic GFR-binding peptide
SPISILYKIGKTPKILKYHYRIKPHQGQH

SEQ ID NO: 128549 - protein, 31 aa, Artificial Sequence
  Cyclic GFR-binding peptide
NAISVLYFEIVRKKPIFLKKYRRIKPHQGQH

SEQ ID NO: 128550 - protein, 29 aa, Artificial Sequence
  Cyclic GFR-binding peptide
SPISMLYKDENEKVVLKYHYRIKPHQGQH

SEQ ID NO: 128551 - protein, 29 aa, Artificial Sequence
  Cyclic GFR-binding peptide
SATSILYYVGRKPKVLRKHRRIKPHQGQH

SEQ ID NO: 128552 - protein, 29 aa, Artificial Sequence
  Cyclic GFR-binding peptide
SPISILYKVGRKPKVLKYHYRIKPHQGQH

SEQ ID NO: 128553 - protein, 31 aa, Artificial Sequence
  Cyclic GFR-binding peptide
SAISVLYLEIVRKKPIFLKNYQRIKPHQGQH

SEQ ID NO: 128554 - protein, 29 aa, Artificial Sequence
  Cyclic GFR-binding peptide
SAISILYLVGRTPKVLKNYQRIKPHQGQH

SEQ ID NO: 128555 - protein, 29 aa, Artificial Sequence
  Cyclic GFR-binding peptide
NAISMLYFDENEKVVLKKYRRIKPHQGQH

SEQ ID NO: 128556 - protein, 29 aa, Artificial Sequence
  Cyclic GFR-binding peptide
SAISVLYLDDMGVPTLKNYQRIKPHQGQH

SEQ ID NO: 128557 - protein, 29 aa, Artificial Sequence
  Cyclic GFR-binding peptide
NAISVLYFDDMGVPTLKKYRRIKPHQGQH

SEQ ID NO: 128558 - protein, 29 aa, Artificial Sequence
  Cyclic GFR-binding peptide
NAISILYFVGRKPKVLKKYRRIKPHQGQH

SEQ ID NO: 128559 - protein, 29 aa, Artificial Sequence
  Cyclic GFR-binding peptide
SAISMLYLDENEKVVLKNYQRIKPHQGQH

SEQ ID NO: 128560 - protein, 29 aa, Artificial Sequence
  Cyclic GFR-binding peptide
SPISVLYKDDSSNVILKYHYRIKPHQGQH

SEQ ID NO: 128561 - protein, 29 aa, Artificial Sequence
  Cyclic GFR-binding peptide
SAISILYLVGRKPKVLKNYQRIKPHQGQH

SEQ ID NO: 128562 - protein, 29 aa, Artificial Sequence
  Cyclic GFR-binding peptide
NAISVLYFDSSNNVILKKYRRIKPHQGQH

SEQ ID NO: 128563 - protein, 29 aa, Artificial Sequence
  Cyclic GFR-binding peptide
NAISVLYFDDSSNVILKKYRRIKPHQGQH

SEQ ID NO: 128564 - protein, 29 aa, Artificial Sequence
  Cyclic GFR-binding peptide
SATSILYYVGRTPKVLRKHRRIKPHQGQH

SEQ ID NO: 128565 - protein, 31 aa, Artificial Sequence
  Cyclic GFR-binding peptide
SPISVLYKEIVRKKPIFLKYHYRIKPHQGQH

SEQ ID NO: 128566 - protein, 29 aa, Artificial Sequence
  Cyclic GFR-binding peptide
SATSILYYIGKTPKILRKHRRIKPHQGQH

SEQ ID NO: 128567 - protein, 29 aa, Artificial Sequence
  Cyclic GFR-binding peptide
SATSVLYYDDMGVPTLRKHRRIKPHQGQH

SEQ ID NO: 128568 - protein, 29 aa, Artificial Sequence
  Cyclic GFR-binding peptide
SPISVLYKDDMGVPTLKYHYRIKPHQGQH

SEQ ID NO: 128569 - protein, 29 aa, Artificial Sequence
  Cyclic GFR-binding peptide
SPISVLYKDSSNNVILKYHYRIKPHQGQH

SEQ ID NO: 128570 - protein, 29 aa, Artificial Sequence
  Cyclic GFR-binding peptide
SATSVLYYDSSNNVILRKHRRIKPHQGQH

SEQ ID NO: 128571 - protein, 29 aa, Artificial Sequence
  Cyclic GFR-binding peptide
SPISILYKVGRTPKVLKYHYRIKPHQGQH

SEQ ID NO: 128572 - protein, 29 aa, Artificial Sequence
  Cyclic GFR-binding peptide
SATSVLYYDDSSNVILRKHRRIKPHQGQH

SEQ ID NO: 128573 - protein, 29 aa, Artificial Sequence
  Cyclic GFR-binding peptide
SATSMLYYDEYDKVVLRKHRRIKPHQGQH

SEQ ID NO: 128574 - protein, 29 aa, Artificial Sequence
  Cyclic GFR-binding peptide
SAISILYLIGKTPKILKNYQRIKPHQGQH

SEQ ID NO: 128575 - protein, 29 aa, Artificial Sequence
  Cyclic GFR-binding peptide
SAISMLYLDEYDKVVLKNYQRIKPHQGQH

SEQ ID NO: 128576 - protein, 29 aa, Artificial Sequence
  Cyclic GFR-binding peptide
SAISVLYLDDSSNVILKNYQRIKPHQGQH

SEQ ID NO: 128577 - protein, 29 aa, Artificial Sequence
  Cyclic GFR-binding peptide
RIKPHQGQHRYKKLIKPTKGIFYLISIAN

SEQ ID NO: 128578 - protein, 29 aa, Artificial Sequence
  Cyclic GFR-binding peptide
RIKPHQGQHNSLQEVVKDYEDYYLMTLPE

SEQ ID NO: 128579 - protein, 29 aa, Artificial Sequence
  Cyclic GFR-binding peptide
RIKPHQGQHNSLQEIKPTKGIYYVIPLPE

SEQ ID NO: 128580 - protein, 29 aa, Artificial Sequence
  Cyclic GFR-binding peptide
RIKPHQGQHNSLQEVKPKRGVYYLITLPE

SEQ ID NO: 128581 - protein, 29 aa, Artificial Sequence
  Cyclic GFR-binding peptide
RIKPHQGQHNSLQEVKPTRGVYYVIPLPE

SEQ ID NO: 128582 - protein, 29 aa, Artificial Sequence
  Cyclic GFR-binding peptide
RIKPHQGQHRYKKLVVKDYEDFYLMSIAN

SEQ ID NO: 128583 - protein, 29 aa, Artificial Sequence
  Cyclic GFR-binding peptide
RIKPHQGQHEYQKYIVNSSDDIFLVSIPS

SEQ ID NO: 128584 - protein, 29 aa, Artificial Sequence
  Cyclic GFR-binding peptide
RIKPHQGQHEYQKYVKPTRGVIFLISIPS

SEQ ID NO: 128585 - protein, 29 aa, Artificial Sequence
  Cyclic GFR-binding peptide
RIKPHQGQHNSLQEVVKENEDYYLMTLPE

SEQ ID NO: 128586 - protein, 29 aa, Artificial Sequence
  Cyclic GFR-binding peptide
RIKPHQGQHRYKKLVKPTRGVFYLISIAN

SEQ ID NO: 128587 - protein, 29 aa, Artificial Sequence
  Cyclic GFR-binding peptide
RIKPHQGQHNSLQEVVNNASDYYLITLPE

SEQ ID NO: 128588 - protein, 29 aa, Artificial Sequence
  Cyclic GFR-binding peptide
RIKPHQGQHNSLQEVKPKRGVYYVIPLPE

SEQ ID NO: 128589 - protein, 29 aa, Artificial Sequence
  Cyclic GFR-binding peptide
RIKPHQGQHNSLQEVVNNASDYYVIPLPE

SEQ ID NO: 128590 - protein, 29 aa, Artificial Sequence
  Cyclic GFR-binding peptide
RIKPHQGQHNSLQEVKPTRGVYYLITLPE

SEQ ID NO: 128591 - protein, 29 aa, Artificial Sequence
  Cyclic GFR-binding peptide
RIKPHQGQHQYNKLVKPTRGVLYLISIAS

SEQ ID NO: 128592 - protein, 29 aa, Artificial Sequence
  Cyclic GFR-binding peptide
RIKPHQGQHRYKKLVVKENEDFYLMSIAN

SEQ ID NO: 128593 - protein, 29 aa, Artificial Sequence
  Cyclic GFR-binding peptide
RIKPHQGQHEYQKYIKPTKGIIFLISIPS

SEQ ID NO: 128594 - protein, 29 aa, Artificial Sequence
  Cyclic GFR-binding peptide
RIKPHQGQHEYQKYVVNNASDIFLISIPS

SEQ ID NO: 128595 - protein, 29 aa, Artificial Sequence
  Cyclic GFR-binding peptide
RIKPHQGQHRYKKLVKPKRGVFYLISIAN

SEQ ID NO: 128596 - protein, 29 aa, Artificial Sequence
  Cyclic GFR-binding peptide
RIKPHQGQHNSLQEIVNSSDDYYVVPLPE

SEQ ID NO: 128597 - protein, 29 aa, Artificial Sequence
  Cyclic GFR-binding peptide
RIKPHQGQHNSLQEVVKDYEDYYVMPLPE

SEQ ID NO: 128598 - protein, 29 aa, Artificial Sequence
  Cyclic GFR-binding peptide
RIKPHQGQHQYNKLVVKENEDLYLMSIAS

SEQ ID NO: 128599 - protein, 29 aa, Artificial Sequence
  Cyclic GFR-binding peptide
RIKPHQGQHEYQKYVVKENEDIFLMSIPS

SEQ ID NO: 128600 - protein, 29 aa, Artificial Sequence
  Cyclic GFR-binding peptide
RIKPHQGQHQYNKLVKPKRGVLYLISIAS

SEQ ID NO: 128601 - protein, 29 aa, Artificial Sequence
  Cyclic GFR-binding peptide
RIKPHQGQHRYKKLIVNSSDDFYLVSIAN

SEQ ID NO: 128602 - protein, 29 aa, Artificial Sequence
  Cyclic GFR-binding peptide
RIKPHQGQHNSLQEVVKENEDYYVMPLPE

SEQ ID NO: 128603 - protein, 29 aa, Artificial Sequence
  Cyclic GFR-binding peptide
RIKPHQGQHEYQKYVVKDYEDIFLMSIPS

SEQ ID NO: 128604 - protein, 29 aa, Artificial Sequence
  Cyclic GFR-binding peptide
RIKPHQGQHQYNKLVVNNASDLYLISIAS

SEQ ID NO: 128605 - protein, 29 aa, Artificial Sequence
  Cyclic GFR-binding peptide
RIKPHQGQHQYNKLIKPTKGILYLISIAS

SEQ ID NO: 128606 - protein, 29 aa, Artificial Sequence
  Cyclic GFR-binding peptide
RIKPHQGQHNSLQEIKPTKGIYYLITLPE

SEQ ID NO: 128607 - protein, 29 aa, Artificial Sequence
  Cyclic GFR-binding peptide
RIKPHQGQHEYQKYVKPKRGVIFLISIPS

SEQ ID NO: 128608 - protein, 29 aa, Artificial Sequence
  Cyclic GFR-binding peptide
RIKPHQGQHQYNKLVVKDYEDLYLMSIAS

SEQ ID NO: 128609 - protein, 29 aa, Artificial Sequence
  Cyclic GFR-binding peptide
RIKPHQGQHRYKKLVVNNASDFYLISIAN

SEQ ID NO: 128610 - protein, 29 aa, Artificial Sequence
  Cyclic GFR-binding peptide
RIKPHQGQHNSLQEIVNSSDDYYLVTLPE

SEQ ID NO: 128611 - protein, 29 aa, Artificial Sequence
  Cyclic GFR-binding peptide
RIKPHQGQHQYNKLIVNSSDDLYLVSIAS

SEQ ID NO: 128612 - protein, 29 aa, Artificial Sequence
  Cyclic GFR-binding peptide
NAISILYFIGKTPKILKKYRRIKPHQGQH

SEQ ID NO: 128613 - protein, 29 aa, Artificial Sequence
  Cyclic GFR-binding peptide
EPLTMLYYDEYDKVVEQLSNRIKPHQGQH

SEQ ID NO: 128614 - protein, 29 aa, Artificial Sequence
  Cyclic GFR-binding peptide
EPLPIVYYIGKTPKIEQLSNRIKPHQGQH

SEQ ID NO: 128615 - protein, 29 aa, Artificial Sequence
  Cyclic GFR-binding peptide
EPLTILYYVGRKPKVEQLSNRIKPHQGQH

SEQ ID NO: 128616 - protein, 29 aa, Artificial Sequence
  Cyclic GFR-binding peptide
EPLPIVYYVGRTPKVEQLSNRIKPHQGQH

SEQ ID NO: 128617 - protein, 29 aa, Artificial Sequence
  Cyclic GFR-binding peptide
NAISMLYFDEYDKVVLKKYRRIKPHQGQH

SEQ ID NO: 128618 - protein, 29 aa, Artificial Sequence
  Cyclic GFR-binding peptide
SPISVLFIDDSSNVIYKQYERIKPHQGQH

SEQ ID NO: 128619 - protein, 29 aa, Artificial Sequence
  Cyclic GFR-binding peptide
SPISILFIVGRTPKVYKQYERIKPHQGQH

SEQ ID NO: 128620 - protein, 29 aa, Artificial Sequence
  Cyclic GFR-binding peptide
EPLTMLYYDENEKVVEQLSNRIKPHQGQH

SEQ ID NO: 128621 - protein, 29 aa, Artificial Sequence
  Cyclic GFR-binding peptide
NAISILYFVGRTPKVLKKYRRIKPHQGQH

SEQ ID NO: 128622 - protein, 29 aa, Artificial Sequence
  Cyclic GFR-binding peptide
EPLTILYYDSANNVVEQLSNRIKPHQGQH

SEQ ID NO: 128623 - protein, 29 aa, Artificial Sequence
  Cyclic GFR-binding peptide
EPLPIVYYVGRKPKVEQLSNRIKPHQGQH

SEQ ID NO: 128624 - protein, 29 aa, Artificial Sequence
  Cyclic GFR-binding peptide
EPLPIVYYDSANNVVEQLSNRIKPHQGQH

SEQ ID NO: 128625 - protein, 29 aa, Artificial Sequence
  Cyclic GFR-binding peptide
EPLTILYYVGRTPKVEQLSNRIKPHQGQH

SEQ ID NO: 128626 - protein, 29 aa, Artificial Sequence
  Cyclic GFR-binding peptide
SAISILYLVGRTPKVLKNYQRIKPHQGQH

SEQ ID NO: 128627 - protein, 29 aa, Artificial Sequence
  Cyclic GFR-binding peptide
NAISMLYFDENEKVVLKKYRRIKPHQGQH

SEQ ID NO: 128628 - protein, 29 aa, Artificial Sequence
  Cyclic GFR-binding peptide
SPISILFIIGKTPKIYKQYERIKPHQGQH

SEQ ID NO: 128629 - protein, 29 aa, Artificial Sequence
  Cyclic GFR-binding peptide
SPISILFIDSANNVVYKQYERIKPHQGQH

SEQ ID NO: 128630 - protein, 29 aa, Artificial Sequence
  Cyclic GFR-binding peptide
NAISILYFVGRKPKVLKKYRRIKPHQGQH

SEQ ID NO: 128631 - protein, 29 aa, Artificial Sequence
  Cyclic GFR-binding peptide
EPLPVVYYDDSSNVIEQLSNRIKPHQGQH

SEQ ID NO: 128632 - protein, 29 aa, Artificial Sequence
  Cyclic GFR-binding peptide
EPLPMVYYDEYDKVVEQLSNRIKPHQGQH

SEQ ID NO: 128633 - protein, 29 aa, Artificial Sequence
  Cyclic GFR-binding peptide
SAISMLYLDENEKVVLKNYQRIKPHQGQH

SEQ ID NO: 128634 - protein, 29 aa, Artificial Sequence
  Cyclic GFR-binding peptide
SPISMLFIDENEKVVYKQYERIKPHQGQH

SEQ ID NO: 128635 - protein, 29 aa, Artificial Sequence
  Cyclic GFR-binding peptide
SAISILYLVGRKPKVLKNYQRIKPHQGQH

SEQ ID NO: 128636 - protein, 29 aa, Artificial Sequence
  Cyclic GFR-binding peptide
NAISVLYFDDSSNVILKKYRRIKPHQGQH

SEQ ID NO: 128637 - protein, 29 aa, Artificial Sequence
  Cyclic GFR-binding peptide
EPLPMVYYDENEKVVEQLSNRIKPHQGQH

SEQ ID NO: 128638 - protein, 29 aa, Artificial Sequence
  Cyclic GFR-binding peptide
SPISMLFIDEYDKVVYKQYERIKPHQGQH

SEQ ID NO: 128639 - protein, 29 aa, Artificial Sequence
  Cyclic GFR-binding peptide
SAISILYLDSANNVVLKNYQRIKPHQGQH

SEQ ID NO: 128640 - protein, 29 aa, Artificial Sequence
  Cyclic GFR-binding peptide
SAISILYLIGKTPKILKNYQRIKPHQGQH

SEQ ID NO: 128641 - protein, 29 aa, Artificial Sequence
  Cyclic GFR-binding peptide
EPLTILYYIGKTPKIEQLSNRIKPHQGQH

SEQ ID NO: 128642 - protein, 29 aa, Artificial Sequence
  Cyclic GFR-binding peptide
SPISILFIVGRKPKVYKQYERIKPHQGQH

SEQ ID NO: 128643 - protein, 29 aa, Artificial Sequence
  Cyclic GFR-binding peptide
SAISMLYLDEYDKVVLKNYQRIKPHQGQH

SEQ ID NO: 128644 - protein, 29 aa, Artificial Sequence
  Cyclic GFR-binding peptide
NAISILYFDSANNVVLKKYRRIKPHQGQH

SEQ ID NO: 128645 - protein, 29 aa, Artificial Sequence
  Cyclic GFR-binding peptide
EPLTVLYYDDSSNVIEQLSNRIKPHQGQH

SEQ ID NO: 128646 - protein, 29 aa, Artificial Sequence
  Cyclic GFR-binding peptide
SAISVLYLDDSSNVILKNYQRIKPHQGQH

SEQ ID NO: 128647 - protein, 31 aa, Artificial Sequence
  Cyclic GFR-binding peptide
RIKPHQGQHVTAKKLKPKKRVYEIKRVQVPR

SEQ ID NO: 128648 - protein, 31 aa, Artificial Sequence
  Cyclic GFR-binding peptide
RIKPHQGQHVQVEKLKPKKRVYEVKAVKVSR

SEQ ID NO: 128649 - protein, 31 aa, Artificial Sequence
  Cyclic GFR-binding peptide
RIKPHQGQHVQVEKFIPKKRVIEVKAVKVSR

SEQ ID NO: 128650 - protein, 31 aa, Artificial Sequence
  Cyclic GFR-binding peptide
RIKPHQGQHVQVEKHQGQHPKIRVKAMKVSR

SEQ ID NO: 128651 - protein, 31 aa, Artificial Sequence
  Cyclic GFR-binding peptide
RIKPHQGQHVTAKKHQGQHPKIRIKRMQVPR

SEQ ID NO: 128652 - protein, 31 aa, Artificial Sequence
  Cyclic GFR-binding peptide
RIKPHQGQHSMEGLLKPKKRVYEMIQVTINS

SEQ ID NO: 128653 - protein, 31 aa, Artificial Sequence
  Cyclic GFR-binding peptide
RIKPHQGQHSMEGIFIPKKRVIEMIQVTINS

SEQ ID NO: 128654 - protein, 31 aa, Artificial Sequence
  Cyclic GFR-binding peptide
RIKPHQGQHSMEGLHQGQHPKIRMIQMTINS

SEQ ID NO: 128655 - protein, 31 aa, Artificial Sequence
  Cyclic GFR-binding peptide
RIKPHQGQHSMEGILKPKKRVYEMIQVTINS

SEQ ID NO: 128656 - protein, 31 aa, Artificial Sequence
  Cyclic GFR-binding peptide
RIKPHQGQHSMEGLFIPKKRVIEMIQVTINS

SEQ ID NO: 128657 - protein, 31 aa, Artificial Sequence
  Cyclic GFR-binding peptide
RIKPHQGQHVTAKKFIPKKRVIEIKRVQVPR

SEQ ID NO: 128658 - protein, 31 aa, Artificial Sequence
  Cyclic GFR-binding peptide
RIKPHQGQHSMEGIHQGQHPKIRMIQMTINS

SEQ ID NO: 128659 - protein, 31 aa, Artificial Sequence
  Cyclic GFR-binding peptide
RPVQVRKIEYVRKKPKLKKATVRIKPHQGQH

SEQ ID NO: 128660 - protein, 31 aa, Artificial Sequence
  Cyclic GFR-binding peptide
RSVKVAKVEYVRKKPKLKEVQVRIKPHQGQH

SEQ ID NO: 128661 - protein, 31 aa, Artificial Sequence
  Cyclic GFR-binding peptide
RSVKVAKVEIVRKKPIFKEVQVRIKPHQGQH

SEQ ID NO: 128662 - protein, 31 aa, Artificial Sequence
  Cyclic GFR-binding peptide
RSVKMAKVRIKPHQGQHKEVQVRIKPHQGQH

SEQ ID NO: 128663 - protein, 31 aa, Artificial Sequence
  Cyclic GFR-binding peptide
RPVQMRKIRIKPHQGQHKKATVRIKPHQGQH

SEQ ID NO: 128664 - protein, 31 aa, Artificial Sequence
  Cyclic GFR-binding peptide
SNITVQIMEYVRKKPKLLGEMSRIKPHQGQH

SEQ ID NO: 128665 - protein, 31 aa, Artificial Sequence
  Cyclic GFR-binding peptide
SNITVQIMEIVRKKPIFIGEMSRIKPHQGQH

SEQ ID NO: 128666 - protein, 31 aa, Artificial Sequence
  Cyclic GFR-binding peptide
SNITMQIMRIKPHQGQHLGEMSRIKPHQGQH

SEQ ID NO: 128667 - protein, 31 aa, Artificial Sequence
  Cyclic GFR-binding peptide
SNITVQIMEYVRKKPKLIGEMSRIKPHQGQH

SEQ ID NO: 128668 - protein, 31 aa, Artificial Sequence
  Cyclic GFR-binding peptide
SNITVQIMEIVRKKPIFLGEMSRIKPHQGQH

SEQ ID NO: 128669 - protein, 31 aa, Artificial Sequence
  Cyclic GFR-binding peptide
RPVQVRKIEIVRKKPIFKKATVRIKPHQGQH

SEQ ID NO: 128670 - protein, 31 aa, Artificial Sequence
  Cyclic GFR-binding peptide
SNITMQIMRIKPHQGQHIGEMSRIKPHQGQH

SEQ ID NO: 128671 - protein, 31 aa, Artificial Sequence; identical to SEQ ID NO: 128647
  Cyclic GFR-binding peptide

SEQ ID NO: 128672 - protein, 31 aa, Artificial Sequence; identical to SEQ ID NO: 128648
  Cyclic GFR-binding peptide

SEQ ID NO: 128673 - protein, 31 aa, Artificial Sequence; identical to SEQ ID NO: 128649
  Cyclic GFR-binding peptide

SEQ ID NO: 128674 - protein, 31 aa, Artificial Sequence; identical to SEQ ID NO: 128650
  Cyclic GFR-binding peptide

SEQ ID NO: 128675 - protein, 31 aa, Artificial Sequence; identical to SEQ ID NO: 128651
  Cyclic GFR-binding peptide

SEQ ID NO: 128676 - protein, 31 aa, Artificial Sequence; identical to SEQ ID NO: 128652
  Cyclic GFR-binding peptide

SEQ ID NO: 128677 - protein, 31 aa, Artificial Sequence; identical to SEQ ID NO: 128653
  Cyclic GFR-binding peptide

SEQ ID NO: 128678 - protein, 31 aa, Artificial Sequence; identical to SEQ ID NO: 128654
  Cyclic GFR-binding peptide

SEQ ID NO: 128679 - protein, 31 aa, Artificial Sequence; identical to SEQ ID NO: 128655
  Cyclic GFR-binding peptide

SEQ ID NO: 128680 - protein, 31 aa, Artificial Sequence; identical to SEQ ID NO: 128656
  Cyclic GFR-binding peptide

SEQ ID NO: 128681 - protein, 31 aa, Artificial Sequence; identical to SEQ ID NO: 128657
  Cyclic GFR-binding peptide

SEQ ID NO: 128682 - protein, 31 aa, Artificial Sequence; identical to SEQ ID NO: 128658
  Cyclic GFR-binding peptide

SEQ ID NO: 128683 - protein, 31 aa, Artificial Sequence; identical to SEQ ID NO: 128659
  Cyclic GFR-binding peptide

SEQ ID NO: 128684 - protein, 31 aa, Artificial Sequence; identical to SEQ ID NO: 128660
  Cyclic GFR-binding peptide

SEQ ID NO: 128685 - protein, 31 aa, Artificial Sequence; identical to SEQ ID NO: 128661
  Cyclic GFR-binding peptide

SEQ ID NO: 128686 - protein, 31 aa, Artificial Sequence; identical to SEQ ID NO: 128662
  Cyclic GFR-binding peptide

SEQ ID NO: 128687 - protein, 31 aa, Artificial Sequence; identical to SEQ ID NO: 128663
  Cyclic GFR-binding peptide

SEQ ID NO: 128688 - protein, 31 aa, Artificial Sequence; identical to SEQ ID NO: 128664
  Cyclic GFR-binding peptide

SEQ ID NO: 128689 - protein, 31 aa, Artificial Sequence; identical to SEQ ID NO: 128665
  Cyclic GFR-binding peptide

SEQ ID NO: 128690 - protein, 31 aa, Artificial Sequence; identical to SEQ ID NO: 128666
  Cyclic GFR-binding peptide

SEQ ID NO: 128691 - protein, 31 aa, Artificial Sequence; identical to SEQ ID NO: 128667
  Cyclic GFR-binding peptide

SEQ ID NO: 128692 - protein, 31 aa, Artificial Sequence; identical to SEQ ID NO: 128668
  Cyclic GFR-binding peptide

SEQ ID NO: 128693 - protein, 31 aa, Artificial Sequence; identical to SEQ ID NO: 128669
  Cyclic GFR-binding peptide

SEQ ID NO: 128694 - protein, 31 aa, Artificial Sequence; identical to SEQ ID NO: 128670
  Cyclic GFR-binding peptide

SEQ ID NO: 128695 - protein, 29 aa, Artificial Sequence
  Cyclic GFR-binding peptide
RIKPHQGQHEYQKYVVKENEDIYLMSIPS

SEQ ID NO: 128696 - protein, 29 aa, Artificial Sequence
  Cyclic GFR-binding peptide
RIKPHQGQHRYKKLIKPTKGIFYLISIAN

SEQ ID NO: 128697 - protein, 29 aa, Artificial Sequence
  Cyclic GFR-binding peptide
RIKPHQGQHEYKFKVKPTRGVLYLISIPE

SEQ ID NO: 128698 - protein, 29 aa, Artificial Sequence
  Cyclic GFR-binding peptide
RIKPHQGQHYHYKLVVKDYEDKYLMSIPS

SEQ ID NO: 128699 - protein, 29 aa, Artificial Sequence
  Cyclic GFR-binding peptide
RIKPHQGQHEYKFKTPVGMDDLYLVSIPE

SEQ ID NO: 128700 - protein, 29 aa, Artificial Sequence
  Cyclic GFR-binding peptide
RIKPHQGQHEYQKYVKPKRGVIYLISIPS

SEQ ID NO: 128701 - protein, 29 aa, Artificial Sequence
  Cyclic GFR-binding peptide
RIKPHQGQHRYKKLVVKDYEDFYLMSIAN

SEQ ID NO: 128702 - protein, 29 aa, Artificial Sequence
  Cyclic GFR-binding peptide
RIKPHQGQHEYQKYVVKDYEDIYLMSIPS

SEQ ID NO: 128703 - protein, 29 aa, Artificial Sequence
  Cyclic GFR-binding peptide
RIKPHQGQHRYKKLVKPTRGVFYLISIAN

SEQ ID NO: 128704 - protein, 29 aa, Artificial Sequence
  Cyclic GFR-binding peptide
RIKPHQGQHYHYKLIKPTKGIKYLISIPS

SEQ ID NO: 128705 - protein, 29 aa, Artificial Sequence
  Cyclic GFR-binding peptide
RIKPHQGQHYHYKLVVKENEDKYLMSIPS

SEQ ID NO: 128706 - protein, 29 aa, Artificial Sequence
  Cyclic GFR-binding peptide
RIKPHQGQHYHYKLVKPKRGVKYLISIPS

SEQ ID NO: 128707 - protein, 29 aa, Artificial Sequence
  Cyclic GFR-binding peptide
RIKPHQGQHEYKFKIKPTKGILYLISIPE

SEQ ID NO: 128708 - protein, 29 aa, Artificial Sequence
  Cyclic GFR-binding peptide
RIKPHQGQHEYQKYIKPTKGIIYLISIPS

SEQ ID NO: 128709 - protein, 29 aa, Artificial Sequence
  Cyclic GFR-binding peptide
RIKPHQGQHRYKKLVVKENEDFYLMSIAN

SEQ ID NO: 128710 - protein, 29 aa, Artificial Sequence
  Cyclic GFR-binding peptide
RIKPHQGQHRYKKLVVNNAADFYLISIAN

SEQ ID NO: 128711 - protein, 29 aa, Artificial Sequence
  Cyclic GFR-binding peptide
RIKPHQGQHYHYKLYTVVGKDKYLISIPS

SEQ ID NO: 128712 - protein, 29 aa, Artificial Sequence
  Cyclic GFR-binding peptide
RIKPHQGQHRYKKLTPVGMDDFYLVSIAN

SEQ ID NO: 128713 - protein, 29 aa, Artificial Sequence
  Cyclic GFR-binding peptide
RIKPHQGQHRYKKLVKPKRGVFYLISIAN

SEQ ID NO: 128714 - protein, 29 aa, Artificial Sequence
  Cyclic GFR-binding peptide
RIKPHQGQHYHYKLVVNNAADKYLISIPS

SEQ ID NO: 128715 - protein, 29 aa, Artificial Sequence
  Cyclic GFR-binding peptide
RIKPHQGQHYHYKLIVNSSDDKYLVSIPS

SEQ ID NO: 128716 - protein, 29 aa, Artificial Sequence
  Cyclic GFR-binding peptide
RIKPHQGQHRYKKLIVNNSSDFYLVSIAN

SEQ ID NO: 128717 - protein, 29 aa, Artificial Sequence
  Cyclic GFR-binding peptide
RIKPHQGQHRYKKLYTVVGKDFYLISIAN

SEQ ID NO: 128718 - protein, 29 aa, Artificial Sequence
  Cyclic GFR-binding peptide
RIKPHQGQHEYQKYVVNNAADIYLISIPS

SEQ ID NO: 128719 - protein, 29 aa, Artificial Sequence
  Cyclic GFR-binding peptide
RIKPHQGQHRYKKLIVNSSDDFYLVSIAN

SEQ ID NO: 128720 - protein, 29 aa, Artificial Sequence
  Cyclic GFR-binding peptide
RIKPHQGQHEYKFKIVNNSSDLYLVSIPE

SEQ ID NO: 128721 - protein, 29 aa, Artificial Sequence
  Cyclic GFR-binding peptide
RIKPHQGQHEYQKYVKPTRGVIYLISIPS

SEQ ID NO: 128722 - protein, 29 aa, Artificial Sequence
  Cyclic GFR-binding peptide
RIKPHQGQHEYQKYIVNSSDDIYLVSIPS

SEQ ID NO: 128723 - protein, 29 aa, Artificial Sequence
  Cyclic GFR-binding peptide
RIKPHQGQHYHYKLTPVGMDDKYLVSIPS

SEQ ID NO: 128724 - protein, 29 aa, Artificial Sequence
  Cyclic GFR-binding peptide
RIKPHQGQHYHYKLIVNNSSDKYLVSIPS

SEQ ID NO: 128725 - protein, 29 aa, Artificial Sequence
  Cyclic GFR-binding peptide
RIKPHQGQHEYKFKIVNSSDDLYLVSIPE

SEQ ID NO: 128726 - protein, 29 aa, Artificial Sequence
  Cyclic GFR-binding peptide
RIKPHQGQHYHYKLVKPTRGVKYLISIPS

SEQ ID NO: 128727 - protein, 29 aa, Artificial Sequence
  Cyclic GFR-binding peptide
RIKPHQGQHEYKFKVKPKRGVLYLISIPE

SEQ ID NO: 128728 - protein, 29 aa, Artificial Sequence
  Cyclic GFR-binding peptide
RIKPHQGQHEYQKYYTVVGKDIYLISIPS

SEQ ID NO: 128729 - protein, 29 aa, Artificial Sequence
  Cyclic GFR-binding peptide
RIKPHQGQHEYKFKVVKENEDLYLMSIPE

SEQ ID NO: 128730 - protein, 29 aa, Artificial Sequence
  Cyclic GFR-binding peptide
RIKPHQGQHEYQKYTPVGMDDIYLVSIPS

SEQ ID NO: 128731 - protein, 29 aa, Artificial Sequence
  Cyclic GFR-binding peptide
RIKPHQGQHEYQKYIVNNSSDIYLVSIPS

SEQ ID NO: 128732 - protein, 29 aa, Artificial Sequence
  Cyclic GFR-binding peptide
RIKPHQGQHEYKFKVVKDYEDLYLMSIPE

SEQ ID NO: 128733 - protein, 29 aa, Artificial Sequence
  Cyclic GFR-binding peptide
RIKPHQGQHEYKFKYTVVGKDLYLISIPE

SEQ ID NO: 128734 - protein, 29 aa, Artificial Sequence
  Cyclic GFR-binding peptide
RIKPHQGQHEYKFKVVNNAADLYLISIPE

SEQ ID NO: 128735 - protein, 29 aa, Artificial Sequence
  Cyclic GFR-binding peptide
SPISMLYIDENEKVVYKQYERIKPHQGQH

SEQ ID NO: 128736 - protein, 29 aa, Artificial Sequence
  Cyclic GFR-binding peptide
NAISILYFIGKTPKILKKYRRIKPHQGQH

SEQ ID NO: 128737 - protein, 29 aa, Artificial Sequence
  Cyclic GFR-binding peptide
EPISILYLVGRTPKVKFKYERIKPHQGQH

SEQ ID NO: 128738 - protein, 29 aa, Artificial Sequence
  Cyclic GFR-binding peptide
SPISMLYKDEYDKVVLKYHYRIKPHQGQH

SEQ ID NO: 128739 - protein, 29 aa, Artificial Sequence
  Cyclic GFR-binding peptide
EPISVLYLDDMGVPTKFKYERIKPHQGQH

SEQ ID NO: 128740 - protein, 29 aa, Artificial Sequence
  Cyclic GFR-binding peptide
SPISILYIVGRKPKVYKQYERIKPHQGQH

SEQ ID NO: 128741 - protein, 29 aa, Artificial Sequence
  Cyclic GFR-binding peptide
NAISMLYFDEYDKVVLKKYRRIKPHQGQH

SEQ ID NO: 128742 - protein, 29 aa, Artificial Sequence
  Cyclic GFR-binding peptide
SPISMLYIDEYDKVVYKQYERIKPHQGQH

SEQ ID NO: 128743 - protein, 29 aa, Artificial Sequence
  Cyclic GFR-binding peptide
NAISILYFVGRTPKVLKKYRRIKPHQGQH

SEQ ID NO: 128744 - protein, 29 aa, Artificial Sequence
  Cyclic GFR-binding peptide
SPISILYKIGKTPKILKYHYRIKPHQGQH

SEQ ID NO: 128745 - protein, 29 aa, Artificial Sequence
  Cyclic GFR-binding peptide
SPISMLYKDENEKVVLKYHYRIKPHQGQH

SEQ ID NO: 128746 - protein, 29 aa, Artificial Sequence
  Cyclic GFR-binding peptide
SPISILYKVGRKPKVLKYHYRIKPHQGQH

SEQ ID NO: 128747 - protein, 29 aa, Artificial Sequence
  Cyclic GFR-binding peptide
EPISILYLIGKTPKIKFKYERIKPHQGQH

SEQ ID NO: 128748 - protein, 29 aa, Artificial Sequence
  Cyclic GFR-binding peptide
SPISILYIIGKTPKIYKQYERIKPHQGQH

SEQ ID NO: 128749 - protein, 29 aa, Artificial Sequence
  Cyclic GFR-binding peptide
NAISMLYFDENEKVVLKKYRRIKPHQGQH

SEQ ID NO: 128750 - protein, 29 aa, Artificial Sequence
  Cyclic GFR-binding peptide
NAISILYFDAANNVVLKKYRRIKPHQGQH

SEQ ID NO: 128751 - protein, 29 aa, Artificial Sequence
  Cyclic GFR-binding peptide
SPISILYKDKGVVTYLKYHYRIKPHQGQH

SEQ ID NO: 128752 - protein, 29 aa, Artificial Sequence
  Cyclic GFR-binding peptide
NAISVLYFDDMGVPTLKKYRRIKPHQGQH

SEQ ID NO: 128753 - protein, 29 aa, Artificial Sequence
  Cyclic GFR-binding peptide
NAISILYFVGRKPKVLKKYRRIKPHQGQH

SEQ ID NO: 128754 - protein, 29 aa, Artificial Sequence
  Cyclic GFR-binding peptide
SPISILYKDAANNVVLKYHYRIKPHQGQH

SEQ ID NO: 128755 - protein, 29 aa, Artificial Sequence
  Cyclic GFR-binding peptide
SPISVLYKDDSSNVILKYHYRIKPHQGQH

SEQ ID NO: 128756 - protein, 29 aa, Artificial Sequence
  Cyclic GFR-binding peptide
NAISVLYFDSSNNVILKKYRRIKPHQGQH

SEQ ID NO: 128757 - protein, 29 aa, Artificial Sequence
  Cyclic GFR-binding peptide
NAISILYFDKGVVTYLKKYRRIKPHQGQH

SEQ ID NO: 128758 - protein, 29 aa, Artificial Sequence
  Cyclic GFR-binding peptide
SPISILYIDAANNVVYKQYERIKPHQGQH

SEQ ID NO: 128759 - protein, 29 aa, Artificial Sequence
  Cyclic GFR-binding peptide
NAISVLYFDDSSNVILKKYRRIKPHQGQH

SEQ ID NO: 128760 - protein, 29 aa, Artificial Sequence
  Cyclic GFR-binding peptide
EPISVLYLDSSNNVIKFKYERIKPHQGQH

SEQ ID NO: 128761 - protein, 29 aa, Artificial Sequence
  Cyclic GFR-binding peptide
SPISILYIVGRTPKVYKQYERIKPHQGQH

SEQ ID NO: 128762 - protein, 29 aa, Artificial Sequence
  Cyclic GFR-binding peptide
SPISVLYIDDSSNVIYKQYERIKPHQGQH

SEQ ID NO: 128763 - protein, 29 aa, Artificial Sequence
  Cyclic GFR-binding peptide
SPISVLYKDDMGVPTLKYHYRIKPHQGQH

SEQ ID NO: 128764 - protein, 29 aa, Artificial Sequence
  Cyclic GFR-binding peptide
SPISVLYKDSSNNVILKYHYRIKPHQGQH

SEQ ID NO: 128765 - protein, 29 aa, Artificial Sequence
  Cyclic GFR-binding peptide
EPISVLYLDDSSNVIKFKYERIKPHQGQH

SEQ ID NO: 128766 - protein, 29 aa, Artificial Sequence
  Cyclic GFR-binding peptide
SPISILYKVGRTPKVLKYHYRIKPHQGQH

SEQ ID NO: 128767 - protein, 29 aa, Artificial Sequence
  Cyclic GFR-binding peptide
EPISILYLVGRKPKVKFKYERIKPHQGQH

SEQ ID NO: 128768 - protein, 29 aa, Artificial Sequence
  Cyclic GFR-binding peptide
SPISILYIDKGVVTYYKQYERIKPHQGQH

SEQ ID NO: 128769 - protein, 29 aa, Artificial Sequence
  Cyclic GFR-binding peptide
EPISMLYLDENEKVVKFKYERIKPHQGQH

SEQ ID NO: 128770 - protein, 29 aa, Artificial Sequence
  Cyclic GFR-binding peptide
SPISVLYIDDMGVPTYKQYERIKPHQGQH

SEQ ID NO: 128771 - protein, 29 aa, Artificial Sequence
  Cyclic GFR-binding peptide
SPISVLYIDSSNNVIYKQYERIKPHQGQH

SEQ ID NO: 128772 - protein, 29 aa, Artificial Sequence
  Cyclic GFR-binding peptide
EPISMLYLDEYDKVVKFKYERIKPHQGQH

SEQ ID NO: 128773 - protein, 29 aa, Artificial Sequence
  Cyclic GFR-binding peptide
EPISILYLDKGVVTYKFKYERIKPHQGQH

SEQ ID NO: 128774 - protein, 29 aa, Artificial Sequence
  Cyclic GFR-binding peptide
EPISILYLDAANNVVKFKYERIKPHQGQH

SEQ ID NO: 128775 - protein, 29 aa, Artificial Sequence
  Cyclic GFR-binding peptide
RIKPHQGQHPIKGYIIQQKDNFYLMNIPS

SEQ ID NO: 128776 - protein, 29 aa, Artificial Sequence
  Cyclic GFR-binding peptide
RIKPHQGQHPIKGYVVKDYEDFYLMNIPS

SEQ ID NO: 128777 - protein, 29 aa, Artificial Sequence
  Cyclic GFR-binding peptide
RIKPHQGQHPIKGYIVNSSDDFYLVNIPS

SEQ ID NO: 128778 - protein, 29 aa, Artificial Sequence
  Cyclic GFR-binding peptide
RIKPHQGQHPIKGYLLVRGNDFYLMNIPS

SEQ ID NO: 128779 - protein, 29 aa, Artificial Sequence
  Cyclic GFR-binding peptide
RIKPHQGQHPIKGYVVNNAADFYLINIPS

SEQ ID NO: 128780 - protein, 29 aa, Artificial Sequence
  Cyclic GFR-binding peptide
RIKPHQGQHPIKGYVVKENEDFYLMNIPS

SEQ ID NO: 128781 - protein, 29 aa, Artificial Sequence
  Cyclic GFR-binding peptide
RIKPHQGQHPIKGYVVNNASDFYLINIPS

SEQ ID NO: 128782 - protein, 29 aa, Artificial Sequence
  Cyclic GFR-binding peptide
RIKPHQGQHPIKGYYTVVGKDFYLINIPS

SEQ ID NO: 128783 - protein, 29 aa, Artificial Sequence
  Cyclic GFR-binding peptide
RIKPHQGQHPIKGYTPVGMDDFYLVNIPS

SEQ ID NO: 128784 - protein, 29 aa, Artificial Sequence
  Cyclic GFR-binding peptide
RIKPHQGQHPIKGYIVNNSSDFYLVNIPS

SEQ ID NO: 128785 - protein, 29 aa, Artificial Sequence
  Cyclic GFR-binding peptide
SPINMLYFNDKQQIIYGKIPRIKPHQGQH

SEQ ID NO: 128786 - protein, 29 aa, Artificial Sequence
  Cyclic GFR-binding peptide
SPINMLYFDEYDKVVYGKIPRIKPHQGQH

SEQ ID NO: 128787 - protein, 29 aa, Artificial Sequence
  Cyclic GFR-binding peptide
SPINVLYFDDSSNVIYGKIPRIKPHQGQH

SEQ ID NO: 128788 - protein, 29 aa, Artificial Sequence
  Cyclic GFR-binding peptide
SPINMLYFDNGRVLLYGKIPRIKPHQGQH

SEQ ID NO: 128789 - protein, 29 aa, Artificial Sequence
  Cyclic GFR-binding peptide
SPINILYFDAANNVVYGKIPRIKPHQGQH

SEQ ID NO: 128790 - protein, 29 aa, Artificial Sequence
  Cyclic GFR-binding peptide
SPINMLYFDENEKVVYGKIPRIKPHQGQH

SEQ ID NO: 128791 - protein, 29 aa, Artificial Sequence
  Cyclic GFR-binding peptide
SPINILYFDSANNVVYGKIPRIKPHQGQH

SEQ ID NO: 128792 - protein, 29 aa, Artificial Sequence
  Cyclic GFR-binding peptide
SPINILYFDKGVVTYYGKIPRIKPHQGQH

SEQ ID NO: 128793 - protein, 29 aa, Artificial Sequence
  Cyclic GFR-binding peptide
SPINVLYFDDMGVPTYGKIPRIKPHQGQH

SEQ ID NO: 128794 - protein, 29 aa, Artificial Sequence
  Cyclic GFR-binding peptide
SPINVLYFDSSNNVIYGKIPRIKPHQGQH

SEQ ID NO: 128795 - protein, 29 aa, Artificial Sequence
  Cyclic GFR-binding peptide
RIKPHQGQHPIKGYIIQQKDNFYLMNIPS

SEQ ID NO: 128796 - protein, 29 aa, Artificial Sequence
  Cyclic GFR-binding peptide
RIKPHQGQHPIKGYVVKDYEDFYLMNIPS

SEQ ID NO: 128797 - protein, 29 aa, Artificial Sequence
  Cyclic GFR-binding peptide
RIKPHQGQHPIKGYIVNSSDDFYLVNIPS

SEQ ID NO: 128798 - protein, 29 aa, Artificial Sequence
  Cyclic GFR-binding peptide
RIKPHQGQHPIKGYLLVRGNDFYLMNIPS

SEQ ID NO: 128799 - protein, 29 aa, Artificial Sequence
  Cyclic GFR-binding peptide
RIKPHQGQHPIKGYVVNNAADFYLINIPS

SEQ ID NO: 128800 - protein, 29 aa, Artificial Sequence
  Cyclic GFR-binding peptide
RIKPHQGQHPIKGYVVKENEDFYLMNIPS

SEQ ID NO: 128801 - protein, 29 aa, Artificial Sequence
  Cyclic GFR-binding peptide
RIKPHQGQHPIKGYVVNNASDFYLINIPS

SEQ ID NO: 128802 - protein, 29 aa, Artificial Sequence
  Cyclic GFR-binding peptide
RIKPHQGQHPIKGYYTVVGKDFYLINIPS

SEQ ID NO: 128803 - protein, 29 aa, Artificial Sequence
  Cyclic GFR-binding peptide
RIKPHQGQHPIKGYTPVGMDDFYLVNIPS

SEQ ID NO: 128804 - protein, 29 aa, Artificial Sequence
  Cyclic GFR-binding peptide
RIKPHQGQHPIKGYIVNNSSDFYLVNIPS

SEQ ID NO: 128805 - protein, 29 aa, Artificial Sequence
  Cyclic GFR-binding peptide
SPINMLYFNDKQQIIYGKIPRIKPHQGQH

SEQ ID NO: 128806 - protein, 29 aa, Artificial Sequence
  Cyclic GFR-binding peptide
SPINMLYFDEYDKVVYGKIPRIKPHQGQH

SEQ ID NO: 128807 - protein, 29 aa, Artificial Sequence
  Cyclic GFR-binding peptide
SPINVLYFDDSSNVIYGKIPRIKPHQGQH

SEQ ID NO: 128808 - protein, 29 aa, Artificial Sequence
  Cyclic GFR-binding peptide
SPINMLYFDNGRVLLYGKIPRIKPHQGQH

SEQ ID NO: 128809 - protein, 29 aa, Artificial Sequence
  Cyclic GFR-binding peptide
SPINILYFDAANNVVYGKIPRIKPHQGQH

SEQ ID NO: 128810 - protein, 29 aa, Artificial Sequence
  Cyclic GFR-binding peptide
SPINMLYFDENEKVVYGKIPRIKPHQGQH

SEQ ID NO: 128811 - protein, 29 aa, Artificial Sequence
  Cyclic GFR-binding peptide
SPINILYFDSANNVVYGKIPRIKPHQGQH

SEQ ID NO: 128812 - protein, 29 aa, Artificial Sequence
  Cyclic GFR-binding peptide
SPINILYFDKGVVTYYGKIPRIKPHQGQH

SEQ ID NO: 128813 - protein, 29 aa, Artificial Sequence
  Cyclic GFR-binding peptide
SPINVLYFDDMGVPTYGKIPRIKPHQGQH

SEQ ID NO: 128814 - protein, 29 aa, Artificial Sequence
  Cyclic GFR-binding peptide
SPINVLYFDSSNNVIYGKIPRIKPHQGQH

SEQ ID NO: 128815 - protein, 29 aa, Artificial Sequence
  Cyclic GFR-binding peptide
RIKPHQGQHRYKKLIKPTKGIFYLISIAN

SEQ ID NO: 128816 - protein, 29 aa, Artificial Sequence
  Cyclic GFR-binding peptide
RIKPHQGQHRYKKLVVKDYEDFYLMSIAN

SEQ ID NO: 128817 - protein, 29 aa, Artificial Sequence
  Cyclic GFR-binding peptide
RIKPHQGQHRYKKLVKPTRGVFYLISIAN

SEQ ID NO: 128818 - protein, 29 aa, Artificial Sequence
  Cyclic GFR-binding peptide
RIKPHQGQHRYKKLVVKENEDFYLMSIAN

SEQ ID NO: 128819 - protein, 29 aa, Artificial Sequence
  Cyclic GFR-binding peptide
RIKPHQGQHRYKKLVKPKRGVFYLISIAN

SEQ ID NO: 128820 - protein, 29 aa, Artificial Sequence
  Cyclic GFR-binding peptide
RIKPHQGQHRYKKLIVNSSDDFYLVSIAN

SEQ ID NO: 128821 - protein, 29 aa, Artificial Sequence
  Cyclic GFR-binding peptide
RIKPHQGQHRYKKLVVNNASDFYLISIAN

SEQ ID NO: 128822 - protein, 29 aa, Artificial Sequence
  Cyclic GFR-binding peptide
NAISILYFIGKTPKILKKYRRIKPHQGQH

SEQ ID NO: 128823 - protein, 29 aa, Artificial Sequence
  Cyclic GFR-binding peptide
NAISMLYFDEYDKVVLKKYRRIKPHQGQH

SEQ ID NO: 128824 - protein, 29 aa, Artificial Sequence
  Cyclic GFR-binding peptide
NAISILYFVGRTPKVLKKYRRIKPHQGQH

SEQ ID NO: 128825 - protein, 29 aa, Artificial Sequence
  Cyclic GFR-binding peptide
NAISMLYFDENEKVVLKKYRRIKPHQGQH

SEQ ID NO: 128826 - protein, 29 aa, Artificial Sequence
  Cyclic GFR-binding peptide
NAISILYFVGRKPKVLKKYRRIKPHQGQH

SEQ ID NO: 128827 - protein, 29 aa, Artificial Sequence
  Cyclic GFR-binding peptide
NAISVLYFDDSSNVILKKYRRIKPHQGQH

SEQ ID NO: 128828 - protein, 29 aa, Artificial Sequence
  Cyclic GFR-binding peptide
NAISILYFDSANNVVLKKYRRIKPHQGQH

SEQ ID NO: 128829 - protein, 29 aa, Artificial Sequence
  Cyclic GFR-binding peptide
RIKPHQGQHEYQKYVVKENEDIYLMSIPS

SEQ ID NO: 128830 - protein, 29 aa, Artificial Sequence
  Cyclic GFR-binding peptide
RIKPHQGQHNSLQEVVKDYEDYYLMTLPE

SEQ ID NO: 128831 - protein, 29 aa, Artificial Sequence
  Cyclic GFR-binding peptide
RIKPHQGQHEYQKYVVKENEDIFLMSIPS

SEQ ID NO: 128832 - protein, 29 aa, Artificial Sequence
  Cyclic GFR-binding peptide
RIKPHQGQHNSLQEIKPTKGIYYVIPLPE

SEQ ID NO: 128833 - protein, 29 aa, Artificial Sequence
  Cyclic GFR-binding peptide
RIKPHQGQHNSLQEVKPKRGVYYLITLPE

SEQ ID NO: 128834 - protein, 29 aa, Artificial Sequence
  Cyclic GFR-binding peptide
RIKPHQGQHEYQKYVVNNAADIYLISIPS

SEQ ID NO: 128835 - protein, 29 aa, Artificial Sequence
  Cyclic GFR-binding peptide
RIKPHQGQHNSLQEVKPTRGVYYVIPLPE

SEQ ID NO: 128836 - protein, 29 aa, Artificial Sequence
  Cyclic GFR-binding peptide
RIKPHQGQHEYQKYIVNSSDDIFLVSIPS

SEQ ID NO: 128837 - protein, 29 aa, Artificial Sequence
  Cyclic GFR-binding peptide
RIKPHQGQHEYQKYVKPTRGVIFLISIPS

SEQ ID NO: 128838 - protein, 29 aa, Artificial Sequence
  Cyclic GFR-binding peptide
RIKPHQGQHEYQKYVVKDYEDIYLMSIPS

SEQ ID NO: 128839 - protein, 29 aa, Artificial Sequence
  Cyclic GFR-binding peptide
RIKPHQGQHNSLQEVVKENEDYYLMTLPE

SEQ ID NO: 128840 - protein, 29 aa, Artificial Sequence
  Cyclic GFR-binding peptide
RIKPHQGQHNSLQEVVNNASDYYLITLPE

SEQ ID NO: 128841 - protein, 29 aa, Artificial Sequence
  Cyclic GFR-binding peptide
RIKPHQGQHNSLQEVKPKRGVYYVIPLPE

SEQ ID NO: 128842 - protein, 29 aa, Artificial Sequence
  Cyclic GFR-binding peptide
RIKPHQGQHEYQKYIVNSSDDIYLVSIPS

SEQ ID NO: 128843 - protein, 29 aa, Artificial Sequence
  Cyclic GFR-binding peptide
RIKPHQGQHNSLQEVVKENEDYYVMPLPE

SEQ ID NO: 128844 - protein, 29 aa, Artificial Sequence
  Cyclic GFR-binding peptide
RIKPHQGQHEYQKYVVKDYEDIFLMSIPS

SEQ ID NO: 128845 - protein, 29 aa, Artificial Sequence
  Cyclic GFR-binding peptide
RIKPHQGQHNSLQEVVNNASDYYVIPLPE

SEQ ID NO: 128846 - protein, 29 aa, Artificial Sequence
  Cyclic GFR-binding peptide
RIKPHQGQHEYQKYVVNNASDIYLISIPS

SEQ ID NO: 128847 - protein, 29 aa, Artificial Sequence
  Cyclic GFR-binding peptide
RIKPHQGQHNSLQEVKPTRGVYYLITLPE

SEQ ID NO: 128848 - protein, 29 aa, Artificial Sequence
  Cyclic GFR-binding peptide
RIKPHQGQHEYQKYYTVVGKDIYLISIPS

SEQ ID NO: 128849 - protein, 29 aa, Artificial Sequence
  Cyclic GFR-binding peptide
RIKPHQGQHEYQKYIIQQKDNIYLMSIPS

SEQ ID NO: 128850 - protein, 29 aa, Artificial Sequence
  Cyclic GFR-binding peptide
RIKPHQGQHEYQKYTPVGMDDIYLVSIPS

SEQ ID NO: 128851 - protein, 29 aa, Artificial Sequence
  Cyclic GFR-binding peptide
RIKPHQGQHEYQKYIKPTKGIIFLISIPS

SEQ ID NO: 128852 - protein, 29 aa, Artificial Sequence
  Cyclic GFR-binding peptide
RIKPHQGQHEYQKYIVNNSSDIYLVSIPS

SEQ ID NO: 128853 - protein, 29 aa, Artificial Sequence
  Cyclic GFR-binding peptide
RIKPHQGQHNSLQEIKPTKGIYYLITLPE

SEQ ID NO: 128854 - protein, 29 aa, Artificial Sequence
  Cyclic GFR-binding peptide
RIKPHQGQHEYQKYVVNNASDIFLISIPS

SEQ ID NO: 128855 - protein, 29 aa, Artificial Sequence
  Cyclic GFR-binding peptide
RIKPHQGQHEYQKYVKPKRGVIFLISIPS

SEQ ID NO: 128856 - protein, 29 aa, Artificial Sequence
  Cyclic GFR-binding peptide
RIKPHQGQHNSLQEIVNSSDDYYVVPLPE

SEQ ID NO: 128857 - protein, 29 aa, Artificial Sequence
  Cyclic GFR-binding peptide
RIKPHQGQHNSLQEVVKDYEDYYVMPLPE

SEQ ID NO: 128858 - protein, 29 aa, Artificial Sequence
  Cyclic GFR-binding peptide
RIKPHQGQHEYQKYLLVRGNDIYLMSIPS

SEQ ID NO: 128859 - protein, 29 aa, Artificial Sequence
  Cyclic GFR-binding peptide
RIKPHQGQHNSLQEIVNSSDDYYLVTLPE

SEQ ID NO: 128860 - protein, 29 aa, Artificial Sequence
  Cyclic GFR-binding peptide
SPISMLYIDENEKVVYKQYERIKPHQGQH

SEQ ID NO: 128861 - protein, 29 aa, Artificial Sequence
  Cyclic GFR-binding peptide
EPLTMLYYDEYDKVVEQLSNRIKPHQGQH

SEQ ID NO: 128862 - protein, 29 aa, Artificial Sequence
  Cyclic GFR-binding peptide
SPISMLFIDENEKVVYKQYERIKPHQGQH

SEQ ID NO: 128863 - protein, 29 aa, Artificial Sequence
  Cyclic GFR-binding peptide
EPLPIVYYIGKTPKIEQLSNRIKPHQGQH

SEQ ID NO: 128864 - protein, 29 aa, Artificial Sequence
  Cyclic GFR-binding peptide
EPLTILYYVGRKPKVEQLSNRIKPHQGQH

SEQ ID NO: 128865 - protein, 29 aa, Artificial Sequence
  Cyclic GFR-binding peptide
SPISILYIDAANNVVYKQYERIKPHQGQH

SEQ ID NO: 128866 - protein, 29 aa, Artificial Sequence
  Cyclic GFR-binding peptide
EPLPIVYYVGRTPKVEQLSNRIKPHQGQH

SEQ ID NO: 128867 - protein, 29 aa, Artificial Sequence
  Cyclic GFR-binding peptide
SPISVLFIDDSSNVIYKQYERIKPHQGQH

SEQ ID NO: 128868 - protein, 29 aa, Artificial Sequence
  Cyclic GFR-binding peptide
SPISILFIVGRTPKVYKQYERIKPHQGQH

SEQ ID NO: 128869 - protein, 29 aa, Artificial Sequence
  Cyclic GFR-binding peptide
SPISMLYIDEYDKVVYKQYERIKPHQGQH

SEQ ID NO: 128870 - protein, 29 aa, Artificial Sequence
  Cyclic GFR-binding peptide
EPLTMLYYDENEKVVEQLSNRIKPHQGQH

SEQ ID NO: 128871 - protein, 29 aa, Artificial Sequence
  Cyclic GFR-binding peptide
EPLTILYYDSANNVVEQLSNRIKPHQGQH

SEQ ID NO: 128872 - protein, 29 aa, Artificial Sequence
  Cyclic GFR-binding peptide
EPLPIVYYVGRKPKVEQLSNRIKPHQGQH

SEQ ID NO: 128873 - protein, 29 aa, Artificial Sequence
  Cyclic GFR-binding peptide
SPISVLYIDDSSNVIYKQYERIKPHQGQH

SEQ ID NO: 128874 - protein, 29 aa, Artificial Sequence
  Cyclic GFR-binding peptide
EPLPMVYYDENEKVVEQLSNRIKPHQGQH

SEQ ID NO: 128875 - protein, 29 aa, Artificial Sequence
  Cyclic GFR-binding peptide
SPISMLFIDEYDKVVYKQYERIKPHQGQH

SEQ ID NO: 128876 - protein, 29 aa, Artificial Sequence
  Cyclic GFR-binding peptide
EPLPIVYYDSANNVVEQLSNRIKPHQGQH

SEQ ID NO: 128877 - protein, 29 aa, Artificial Sequence
  Cyclic GFR-binding peptide
SPISILYIDSANNVVYKQYERIKPHQGQH

SEQ ID NO: 128878 - protein, 29 aa, Artificial Sequence
  Cyclic GFR-binding peptide
EPLTILYYVGRTPKVEQLSNRIKPHQGQH

SEQ ID NO: 128879 - protein, 29 aa, Artificial Sequence
  Cyclic GFR-binding peptide
SPISILYIDKGVVTYYKQYERIKPHQGQH

SEQ ID NO: 128880 - protein, 29 aa, Artificial Sequence
  Cyclic GFR-binding peptide
SPISMLYINDKQQIIYKQYERIKPHQGQH

SEQ ID NO: 128881 - protein, 29 aa, Artificial Sequence
  Cyclic GFR-binding peptide
SPISVLYIDDMGVPTYKQYERIKPHQGQH

SEQ ID NO: 128882 - protein, 29 aa, Artificial Sequence
  Cyclic GFR-binding peptide
SPISILFIIGKTPKIYKQYERIKPHQGQH

SEQ ID NO: 128883 - protein, 29 aa, Artificial Sequence
  Cyclic GFR-binding peptide
SPISVLYIDSSNNVIYKQYERIKPHQGQH

SEQ ID NO: 128884 - protein, 29 aa, Artificial Sequence
  Cyclic GFR-binding peptide
EPLTILYYIGKTPKIEQLSNRIKPHQGQH

SEQ ID NO: 128885 - protein, 29 aa, Artificial Sequence
  Cyclic GFR-binding peptide
SPISILFIDSANNVVYKQYERIKPHQGQH

SEQ ID NO: 128886 - protein, 29 aa, Artificial Sequence
  Cyclic GFR-binding peptide
SPISILFIVGRKPKVYKQYERIKPHQGQH

SEQ ID NO: 128887 - protein, 29 aa, Artificial Sequence
  Cyclic GFR-binding peptide
EPLPVVYYDDSSNVIEQLSNRIKPHQGQH

SEQ ID NO: 128888 - protein, 29 aa, Artificial Sequence
  Cyclic GFR-binding peptide
EPLPMVYYDEYDKVVEQLSNRIKPHQGQH

SEQ ID NO: 128889 - protein, 29 aa, Artificial Sequence
  Cyclic GFR-binding peptide
SPISMLYIDNGRVLLYKQYERIKPHQGQH

SEQ ID NO: 128890 - protein, 29 aa, Artificial Sequence
  Cyclic GFR-binding peptide
EPLTVLYYDDSSNVIEQLSNRIKPHQGQH

SEQ ID NO: 128891 - protein, 29 aa, Artificial Sequence
  Cyclic GFR-binding peptide
RIKPHQGQHPYVKLVVKENEDFFLMSLSS

SEQ ID NO: 128892 - protein, 31 aa, Artificial Sequence
  Cyclic GFR-binding peptide
RIKPHQGQHPYVKLHQGQHPKIRFFLMSLSS

SEQ ID NO: 128893 - protein, 29 aa, Artificial Sequence
  Cyclic GFR-binding peptide
RIKPHQGQHPYVKLVVNKNEDFFLISLSS

SEQ ID NO: 128894 - protein, 29 aa, Artificial Sequence
  Cyclic GFR-binding peptide
RIKPHQGQHPYVKLVKPKRGVLFFISLSS

SEQ ID NO: 128895 - protein, 29 aa, Artificial Sequence
  Cyclic GFR-binding peptide
RIKPHQGQHPYVKLVVNNAADFFLISLSS

SEQ ID NO: 128896 - protein, 29 aa, Artificial Sequence
  Cyclic GFR-binding peptide
RIKPHQGQHPYVKLIVNNSSDFFLVSLSS

SEQ ID NO: 128897 - protein, 29 aa, Artificial Sequence
  Cyclic GFR-binding peptide
RIKPHQGQHPYVKLIIQQKDNFFLMSLSS

SEQ ID NO: 128898 - protein, 29 aa, Artificial Sequence
  Cyclic GFR-binding peptide
RIKPHQGQHPYVKLLLVRGNDFFLMSLSS

SEQ ID NO: 128899 - protein, 29 aa, Artificial Sequence
  Cyclic GFR-binding peptide
RIKPHQGQHPYVKLVKPTRGVLFFISLSS

SEQ ID NO: 128900 - protein, 29 aa, Artificial Sequence
  Cyclic GFR-binding peptide
RIKPHQGQHPYVKLVVNNASDFFLISLSS

SEQ ID NO: 128901 - protein, 29 aa, Artificial Sequence
  Cyclic GFR-binding peptide
RIKPHQGQHPYVKLIKPTKGILFFISLSS

SEQ ID NO: 128902 - protein, 29 aa, Artificial Sequence
  Cyclic GFR-binding peptide
RIKPHQGQHPYVKLTPVGMDDFFLVSLSS

SEQ ID NO: 128903 - protein, 29 aa, Artificial Sequence
  Cyclic GFR-binding peptide
RIKPHQGQHPYVKLYTVVGKDFFLISLSS

SEQ ID NO: 128904 - protein, 29 aa, Artificial Sequence
  Cyclic GFR-binding peptide
RIKPHQGQHPYVKLVVKDYEDFFLMSLSS

SEQ ID NO: 128905 - protein, 29 aa, Artificial Sequence
  Cyclic GFR-binding peptide
RIKPHQGQHPYVKLIVNSSDDFFLVSLSS

SEQ ID NO: 128906 - protein, 31 aa, Artificial Sequence
  Cyclic GFR-binding peptide
RIKPHQGQHPYVKLLKPKKRVYEFFLVSLSS

SEQ ID NO: 128907 - protein, 29 aa, Artificial Sequence
  Cyclic GFR-binding peptide
SSLSMLFFDENEKVVLKVYPRIKPHQGQH

SEQ ID NO: 128908 - protein, 31 aa, Artificial Sequence
  Cyclic GFR-binding peptide
SSLSMLFFRIKPHQGQHLKVYPRIKPHQGQH

SEQ ID NO: 128909 - protein, 29 aa, Artificial Sequence
  Cyclic GFR-binding peptide
SSLSILFFDENKNVVLKVYPRIKPHQGQH

SEQ ID NO: 128910 - protein, 29 aa, Artificial Sequence
  Cyclic GFR-binding peptide
SSLSILFFVGRKPKVLKVYPRIKPHQGQH

SEQ ID NO: 128911 - protein, 29 aa, Artificial Sequence
  Cyclic GFR-binding peptide
SSLSILFFDAANNVVLKVYPRIKPHQGQH

SEQ ID NO: 128912 - protein, 29 aa, Artificial Sequence
  Cyclic GFR-binding peptide
SSLSVLFFDSSNNVILKVYPRIKPHQGQH

SEQ ID NO: 128913 - protein, 29 aa, Artificial Sequence
  Cyclic GFR-binding peptide
SSLSMLFFNDKQQIILKVYPRIKPHQGQH

SEQ ID NO: 128914 - protein, 29 aa, Artificial Sequence
  Cyclic GFR-binding peptide
SSLSMLFFDNGRVLLLKVYPRIKPHQGQH

SEQ ID NO: 128915 - protein, 29 aa, Artificial Sequence
  Cyclic GFR-binding peptide
SSLSILFFVGRTPKVLKVYPRIKPHQGQH

SEQ ID NO: 128916 - protein, 29 aa, Artificial Sequence
  Cyclic GFR-binding peptide
SSLSILFFDSANNVVLKVYPRIKPHQGQH

SEQ ID NO: 128917 - protein, 29 aa, Artificial Sequence
  Cyclic GFR-binding peptide
SSLSILFFIGKTPKILKVYPRIKPHQGQH

SEQ ID NO: 128918 - protein, 29 aa, Artificial Sequence
  Cyclic GFR-binding peptide
SSLSVLFFDDMGVPTLKVYPRIKPHQGQH

SEQ ID NO: 128919 - protein, 29 aa, Artificial Sequence
  Cyclic GFR-binding peptide
SSLSILFFDKGVVTYLKVYPRIKPHQGQH

SEQ ID NO: 128920 - protein, 29 aa, Artificial Sequence
  Cyclic GFR-binding peptide
SSLSMLFFDEYDKVVLKVYPRIKPHQGQH

SEQ ID NO: 128921 - protein, 29 aa, Artificial Sequence
  Cyclic GFR-binding peptide
SSLSVLFFDDSSNVILKVYPRIKPHQGQH

SEQ ID NO: 128922 - protein, 31 aa, Artificial Sequence
  Cyclic GFR-binding peptide
SSLSVLFFEYVRKKPKLLKVYPRIKPHQGQH

SEQ ID NO: 128923 - protein, 29 aa, Artificial Sequence
  Cyclic GFR-binding peptide
RIKPHQGQHNSLQEVVKDYEDYYLMTLPE

SEQ ID NO: 128924 - protein, 29 aa, Artificial Sequence
  Cyclic GFR-binding peptide
RIKPHQGQHNSLQEIKPTKGIYYVIPLPE

SEQ ID NO: 128925 - protein, 29 aa, Artificial Sequence
  Cyclic GFR-binding peptide
RIKPHQGQHSMEGIIVNSSDDMIQVTINS

SEQ ID NO: 128926 - protein, 29 aa, Artificial Sequence
  Cyclic GFR-binding peptide
RIKPHQGQHNSLQEVKPKRGVYYLITLPE

SEQ ID NO: 128927 - protein, 29 aa, Artificial Sequence
  Cyclic GFR-binding peptide
RIKPHQGQHNSLQEVKPTRGVYYVIPLPE

SEQ ID NO: 128928 - protein, 29 aa, Artificial Sequence
  Cyclic GFR-binding peptide
RIKPHQGQHVTAKKVVKENEDIKRMQVPR

SEQ ID NO: 128929 - protein, 29 aa, Artificial Sequence
  Cyclic GFR-binding peptide
RIKPHQGQHNSLQEIVNSSDDYYVVPLPE

SEQ ID NO: 128930 - protein, 31 aa, Artificial Sequence; identical to SEQ ID NO: 128658
  Cyclic GFR-binding peptide

SEQ ID NO: 128931 - protein, 31 aa, Artificial Sequence; identical to SEQ ID NO: 128647
  Cyclic GFR-binding peptide

SEQ ID NO: 128932 - protein, 29 aa, Artificial Sequence
  Cyclic GFR-binding peptide
RIKPHQGQHSMEGIVVKDYEDMIQMTINS

SEQ ID NO: 128933 - protein, 31 aa, Artificial Sequence; identical to SEQ ID NO: 128650
  Cyclic GFR-binding peptide

SEQ ID NO: 128934 - protein, 29 aa, Artificial Sequence
  Cyclic GFR-binding peptide
RIKPHQGQHVTAKKIKPTKGIIKRIQVPR

SEQ ID NO: 128935 - protein, 29 aa, Artificial Sequence
  Cyclic GFR-binding peptide
RIKPHQGQHSMEGIVKPTRGVMIQITINS

SEQ ID NO: 128936 - protein, 31 aa, Artificial Sequence
  Cyclic GFR-binding peptide
RIKPHQGQHNSLQEFIPKKRVIEYYVVPLPE

SEQ ID NO: 128937 - protein, 29 aa, Artificial Sequence
  Cyclic GFR-binding peptide
RIKPHQGQHVQVEKVKPKRGVVKAIKVSR

SEQ ID NO: 128938 - protein, 29 aa, Artificial Sequence
  Cyclic GFR-binding peptide
RIKPHQGQHVQVEKVVKENEDVKAMKVSR

SEQ ID NO: 128939 - protein, 29 aa, Artificial Sequence
  Cyclic GFR-binding peptide
RIKPHQGQHNSLQEVVKENEDYYVMPLPE

SEQ ID NO: 128940 - protein, 29 aa, Artificial Sequence
  Cyclic GFR-binding peptide
RIKPHQGQHVTAKKIVNSSDDIKRVQVPR

SEQ ID NO: 128941 - protein, 29 aa, Artificial Sequence
  Cyclic GFR-binding peptide
RIKPHQGQHVQVEKIKPTKGIVKAIKVSR

SEQ ID NO: 128942 - protein, 29 aa, Artificial Sequence
  Cyclic GFR-binding peptide
RIKPHQGQHNSLQEIKPTKGIYYLITLPE

SEQ ID NO: 128943 - protein, 31 aa, Artificial Sequence
  Cyclic GFR-binding peptide
RIKPHQGQHNSLQEFIPKKRVIEYYLVTLPE

SEQ ID NO: 128944 - protein, 29 aa, Artificial Sequence
  Cyclic GFR-binding peptide
RIKPHQGQHVQVEKIVNSSDDVKAVKVSR

SEQ ID NO: 128945 - protein, 29 aa, Artificial Sequence
  Cyclic GFR-binding peptide
RIKPHQGQHNSLQEIVNSSDDYYLVTLPE

SEQ ID NO: 128946 - protein, 31 aa, Artificial Sequence; identical to SEQ ID NO: 128648
  Cyclic GFR-binding peptide

SEQ ID NO: 128947 - protein, 31 aa, Artificial Sequence; identical to SEQ ID NO: 128649
  Cyclic GFR-binding peptide

SEQ ID NO: 128948 - protein, 31 aa, Artificial Sequence; identical to SEQ ID NO: 128651
  Cyclic GFR-binding peptide

SEQ ID NO: 128949 - protein, 29 aa, Artificial Sequence
  Cyclic GFR-binding peptide
RIKPHQGQHNSLQEVVKENEDYYLMTLPE

SEQ ID NO: 128950 - protein, 31 aa, Artificial Sequence; identical to SEQ ID NO: 128653
  Cyclic GFR-binding peptide

SEQ ID NO: 128951 - protein, 29 aa, Artificial Sequence
  Cyclic GFR-binding peptide
RIKPHQGQHNSLQEVKPKRGVYYVIPLPE

SEQ ID NO: 128952 - protein, 29 aa, Artificial Sequence
  Cyclic GFR-binding peptide
RIKPHQGQHVTAKKVKPKRGVIKRIQVPR

SEQ ID NO: 128953 - protein, 29 aa, Artificial Sequence
  Cyclic GFR-binding peptide
RIKPHQGQHNSLQEVKPTRGVYYLITLPE

SEQ ID NO: 128954 - protein, 29 aa, Artificial Sequence
  Cyclic GFR-binding peptide
RIKPHQGQHVQVEKVKPTRGVVKAIKVSR

SEQ ID NO: 128955 - protein, 31 aa, Artificial Sequence; identical to SEQ ID NO: 128655
  Cyclic GFR-binding peptide

SEQ ID NO: 128956 - protein, 29 aa, Artificial Sequence
  Cyclic GFR-binding peptide
RIKPHQGQHNSLQEVVKDYEDYYVMPLPE

SEQ ID NO: 128957 - protein, 29 aa, Artificial Sequence
  Cyclic GFR-binding peptide
RIKPHQGQHVTAKKVKPTRGVIKRIQVPR

SEQ ID NO: 128958 - protein, 31 aa, Artificial Sequence
  Cyclic GFR-binding peptide
RIKPHQGQHNSLQELKPKKRVYEYYLVTLPE

SEQ ID NO: 128959 - protein, 29 aa, Artificial Sequence
  Cyclic GFR-binding peptide
RIKPHQGQHSMEGIVKPKRGVMIQITINS

SEQ ID NO: 128960 - protein, 29 aa, Artificial Sequence
  Cyclic GFR-binding peptide
RIKPHQGQHSMEGIVVKENEDMIQMTINS

SEQ ID NO: 128961 - protein, 29 aa, Artificial Sequence
  Cyclic GFR-binding peptide
RIKPHQGQHSMEGIIKPTKGIMIQITINS

SEQ ID NO: 128962 - protein, 31 aa, Artificial Sequence
  Cyclic GFR-binding peptide
RIKPHQGQHNSLQEHQGQHPKIRYYLMTLPE

SEQ ID NO: 128963 - protein, 29 aa, Artificial Sequence
  Cyclic GFR-binding peptide
RIKPHQGQHVTAKKVVKDYEDIKRMQVPR

SEQ ID NO: 128964 - protein, 31 aa, Artificial Sequence
  Cyclic GFR-binding peptide
RIKPHQGQHNSLQEHQGQHPKIRYYVMPLPE

SEQ ID NO: 128965 - protein, 31 aa, Artificial Sequence
  Cyclic GFR-binding peptide
RIKPHQGQHNSLQELKPKKRVYEYYVVPLPE

SEQ ID NO: 128966 - protein, 31 aa, Artificial Sequence; identical to SEQ ID NO: 128657
  Cyclic GFR-binding peptide

SEQ ID NO: 128967 - protein, 29 aa, Artificial Sequence
  Cyclic GFR-binding peptide
RIKPHQGQHVQVEKVVKDYEDVKAMKVSR

SEQ ID NO: 128968 - protein, 29 aa, Artificial Sequence
  Cyclic GFR-binding peptide
EPLTMLYYDEYDKVVEQLSNRIKPHQGQH

SEQ ID NO: 128969 - protein, 29 aa, Artificial Sequence
  Cyclic GFR-binding peptide
EPLPIVYYIGKTPKIEQLSNRIKPHQGQH

SEQ ID NO: 128970 - protein, 29 aa, Artificial Sequence
  Cyclic GFR-binding peptide
SNITVQIMDDSSNVIIGEMSRIKPHQGQH

SEQ ID NO: 128971 - protein, 29 aa, Artificial Sequence
  Cyclic GFR-binding peptide
EPLTILYYVGRKPKVEQLSNRIKPHQGQH

SEQ ID NO: 128972 - protein, 29 aa, Artificial Sequence
  Cyclic GFR-binding peptide
EPLPIVYYVGRTPKVEQLSNRIKPHQGQH

SEQ ID NO: 128973 - protein, 29 aa, Artificial Sequence
  Cyclic GFR-binding peptide
RPVQMRKIDENEKVVKKATVRIKPHQGQH

SEQ ID NO: 128974 - protein, 29 aa, Artificial Sequence
  Cyclic GFR-binding peptide
EPLPVVYYDDSSNVIEQLSNRIKPHQGQH

SEQ ID NO: 128975 - protein, 31 aa, Artificial Sequence; identical to SEQ ID NO: 128670
  Cyclic GFR-binding peptide

SEQ ID NO: 128976 - protein, 31 aa, Artificial Sequence; identical to SEQ ID NO: 128659
  Cyclic GFR-binding peptide

SEQ ID NO: 128977 - protein, 29 aa, Artificial Sequence
  Cyclic GFR-binding peptide
SNITMQIMDEYDKVVIGEMSRIKPHQGQH

SEQ ID NO: 128978 - protein, 31 aa, Artificial Sequence; identical to SEQ ID NO: 128662
  Cyclic GFR-binding peptide

SEQ ID NO: 128979 - protein, 29 aa, Artificial Sequence
  Cyclic GFR-binding peptide
RPVQIRKIIGKTPKIKKATVRIKPHQGQH

SEQ ID NO: 128980 - protein, 29 aa, Artificial Sequence
  Cyclic GFR-binding peptide
SNITIQIMVGRTPKVIGEMSRIKPHQGQH

SEQ ID NO: 128981 - protein, 31 aa, Artificial Sequence
  Cyclic GFR-binding peptide
EPLPVVYYEIVRKKPIFEQLSNRIKPHQGQH

SEQ ID NO: 128982 - protein, 29 aa, Artificial Sequence
  Cyclic GFR-binding peptide
RSVKIAKVVGRKPKVKEVQVRIKPHQGQH

SEQ ID NO: 128983 - protein, 29 aa, Artificial Sequence
  Cyclic GFR-binding peptide
RSVKMAKVDENEKVVKEVQVRIKPHQGQH

SEQ ID NO: 128984 - protein, 29 aa, Artificial Sequence
  Cyclic GFR-binding peptide
EPLPMVYYDENEKVVEQLSNRIKPHQGQH

SEQ ID NO: 128985 - protein, 29 aa, Artificial Sequence
  Cyclic GFR-binding peptide
RPVQVRKIDDSSNVIKKATVRIKPHQGQH

SEQ ID NO: 128986 - protein, 29 aa, Artificial Sequence
  Cyclic GFR-binding peptide
RSVKIAKVIGKTPKIKEVQVRIKPHQGQH

SEQ ID NO: 128987 - protein, 29 aa, Artificial Sequence
  Cyclic GFR-binding peptide
EPLTILYYIGKTPKIEQLSNRIKPHQGQH

SEQ ID NO: 128988 - protein, 31 aa, Artificial Sequence
  Cyclic GFR-binding peptide
EPLTVLYYEIVRKKPIFEQLSNRIKPHQGQH

SEQ ID NO: 128989 - protein, 29 aa, Artificial Sequence
  Cyclic GFR-binding peptide
RSVKVAKVDDSSNVIKEVQVRIKPHQGQH

SEQ ID NO: 128990 - protein, 29 aa, Artificial Sequence
  Cyclic GFR-binding peptide
EPLTVLYYDDSSNVIEQLSNRIKPHQGQH

SEQ ID NO: 128991 - protein, 31 aa, Artificial Sequence; identical to SEQ ID NO: 128660
  Cyclic GFR-binding peptide

SEQ ID NO: 128992 - protein, 31 aa, Artificial Sequence; identical to SEQ ID NO: 128661
  Cyclic GFR-binding peptide

SEQ ID NO: 128993 - protein, 31 aa, Artificial Sequence; identical to SEQ ID NO: 128663
  Cyclic GFR-binding peptide

SEQ ID NO: 128994 - protein, 29 aa, Artificial Sequence
  Cyclic GFR-binding peptide
EPLTMLYYDENEKVVEQLSNRIKPHQGQH

SEQ ID NO: 128995 - protein, 31 aa, Artificial Sequence; identical to SEQ ID NO: 128665
  Cyclic GFR-binding peptide

SEQ ID NO: 128996 - protein, 29 aa, Artificial Sequence
  Cyclic GFR-binding peptide
EPLPIVYYVGRKPKVEQLSNRIKPHQGQH

SEQ ID NO: 128997 - protein, 29 aa, Artificial Sequence
  Cyclic GFR-binding peptide
RPVQIRKIVGRKPKVKKATVRIKPHQGQH

SEQ ID NO: 128998 - protein, 29 aa, Artificial Sequence
  Cyclic GFR-binding peptide
EPLTILYYVGRTPKVEQLSNRIKPHQGQH

SEQ ID NO: 128999 - protein, 29 aa, Artificial Sequence
  Cyclic GFR-binding peptide
RSVKIAKVVGRTPKVKEVQVRIKPHQGQH

SEQ ID NO: 129000 - protein, 31 aa, Artificial Sequence; identical to SEQ ID NO: 128667
  Cyclic GFR-binding peptide

SEQ ID NO: 129001 - protein, 29 aa, Artificial Sequence
  Cyclic GFR-binding peptide
EPLPMVYYDEYDKVVEQLSNRIKPHQGQH

SEQ ID NO: 129002 - protein, 29 aa, Artificial Sequence
  Cyclic GFR-binding peptide
RPVQIRKIVGRTPKVKKATVRIKPHQGQH

SEQ ID NO: 129003 - protein, 31 aa, Artificial Sequence
  Cyclic GFR-binding peptide
EPLTVLYYEYVRKKPKLEQLSNRIKPHQGQH

SEQ ID NO: 129004 - protein, 29 aa, Artificial Sequence
  Cyclic GFR-binding peptide
SNITIQIMVGRKPKVIGEMSRIKPHQGQH

SEQ ID NO: 129005 - protein, 29 aa, Artificial Sequence
  Cyclic GFR-binding peptide
SNITMQIMDENEKVVIGEMSRIKPHQGQH

SEQ ID NO: 129006 - protein, 29 aa, Artificial Sequence
  Cyclic GFR-binding peptide
SNITIQIMIGKTPKIIGEMSRIKPHQGQH

SEQ ID NO: 129007 - protein, 31 aa, Artificial Sequence
  Cyclic GFR-binding peptide
EPLTMLYYRIKPHQGQHEQLSNRIKPHQGQH

SEQ ID NO: 129008 - protein, 29 aa, Artificial Sequence
  Cyclic GFR-binding peptide
RPVQMRKIDEYDKVVKKATVRIKPHQGQH

SEQ ID NO: 129009 - protein, 31 aa, Artificial Sequence
  Cyclic GFR-binding peptide
EPLPMVYYRIKPHQGQHEQLSNRIKPHQGQH

SEQ ID NO: 129010 - protein, 31 aa, Artificial Sequence
  Cyclic GFR-binding peptide
EPLPVVYYEYVRKKPKLEQLSNRIKPHQGQH

SEQ ID NO: 129011 - protein, 31 aa, Artificial Sequence; identical to SEQ ID NO: 128669
  Cyclic GFR-binding peptide

SEQ ID NO: 129012 - protein, 29 aa, Artificial Sequence
  Cyclic GFR-binding peptide
RSVKMAKVDEYDKVVKEVQVRIKPHQGQH

SEQ ID NO: 129013 - protein, 29 aa, Artificial Sequence
  Cyclic GFR-binding peptide
RIKPHQGQHRYKKLIIQQKDNFYLMSIAN

SEQ ID NO: 129014 - protein, 29 aa, Artificial Sequence
  Cyclic GFR-binding peptide
RIKPHQGQHRYKKLIVNNSSDFYLVSIAN

SEQ ID NO: 129015 - protein, 29 aa, Artificial Sequence
  Cyclic GFR-binding peptide
RIKPHQGQHRYKKLYTVVGKDFYLISIAN

SEQ ID NO: 129016 - protein, 29 aa, Artificial Sequence
  Cyclic GFR-binding peptide
RIKPHQGQHRYKKLIVNSSDDFYLVSIAN

SEQ ID NO: 129017 - protein, 29 aa, Artificial Sequence
  Cyclic GFR-binding peptide
RIKPHQGQHRYKKLVVKDYEDFYLMSIAN

SEQ ID NO: 129018 - protein, 29 aa, Artificial Sequence
  Cyclic GFR-binding peptide
RIKPHQGQHRYKKLLLVRGNDFYLMSIAN

SEQ ID NO: 129019 - protein, 29 aa, Artificial Sequence
  Cyclic GFR-binding peptide
RIKPHQGQHRYKKLVVKENEDFYLMSIAN

SEQ ID NO: 129020 - protein, 29 aa, Artificial Sequence
  Cyclic GFR-binding peptide
RIKPHQGQHRYKKLVVNNAADFYLISIAN

SEQ ID NO: 129021 - protein, 29 aa, Artificial Sequence
  Cyclic GFR-binding peptide
RIKPHQGQHRYKKLTPVGMDDFYLVSIAN

SEQ ID NO: 129022 - protein, 29 aa, Artificial Sequence
  Cyclic GFR-binding peptide
RIKPHQGQHRYKKLVVNNASDFYLISIAN

SEQ ID NO: 129023 - protein, 29 aa, Artificial Sequence
  Cyclic GFR-binding peptide
NAISMLYFNDKQQIILKKYRRIKPHQGQH

SEQ ID NO: 129024 - protein, 29 aa, Artificial Sequence
  Cyclic GFR-binding peptide
NAISVLYFDSSNNVILKKYRRIKPHQGQH

SEQ ID NO: 129025 - protein, 29 aa, Artificial Sequence
  Cyclic GFR-binding peptide
NAISILYFDKGVVTYLKKYRRIKPHQGQH

SEQ ID NO: 129026 - protein, 29 aa, Artificial Sequence
  Cyclic GFR-binding peptide
NAISVLYFDDSSNVILKKYRRIKPHQGQH

SEQ ID NO: 129027 - protein, 29 aa, Artificial Sequence
  Cyclic GFR-binding peptide
NAISMLYFDEYDKVVLKKYRRIKPHQGQH

SEQ ID NO: 129028 - protein, 29 aa, Artificial Sequence
  Cyclic GFR-binding peptide
NAISMLYFDNGRVLLLKKYRRIKPHQGQH

SEQ ID NO: 129029 - protein, 29 aa, Artificial Sequence
  Cyclic GFR-binding peptide
NAISMLYFDENEKVVLKKYRRIKPHQGQH

SEQ ID NO: 129030 - protein, 29 aa, Artificial Sequence
  Cyclic GFR-binding peptide
NAISILYFDAANNVVLKKYRRIKPHQGQH

SEQ ID NO: 129031 - protein, 29 aa, Artificial Sequence
  Cyclic GFR-binding peptide
NAISVLYFDDMGVPTLKKYRRIKPHQGQH

SEQ ID NO: 129032 - protein, 29 aa, Artificial Sequence
  Cyclic GFR-binding peptide
NAISILYFDSANNVVLKKYRRIKPHQGQH

SEQ ID NO: 129033 - protein, 29 aa, Artificial Sequence
  Cyclic GFR-binding peptide
RIKPHQGQHEYKFKVKPTRGVLYLISIPE

SEQ ID NO: 129034 - protein, 29 aa, Artificial Sequence
  Cyclic GFR-binding peptide
RIKPHQGQHYHYKLVVKDYEDKYLMSIPS

SEQ ID NO: 129035 - protein, 29 aa, Artificial Sequence
  Cyclic GFR-binding peptide
RIKPHQGQHEYKFKTPVGMDDLYLVSIPE

SEQ ID NO: 129036 - protein, 29 aa, Artificial Sequence
  Cyclic GFR-binding peptide
RIKPHQGQHRYKKLVVKDYEDFYLMSIAN

SEQ ID NO: 129037 - protein, 29 aa, Artificial Sequence
  Cyclic GFR-binding peptide
RIKPHQGQHRHKRLVKPKRGVYYLISTAS

SEQ ID NO: 129038 - protein, 29 aa, Artificial Sequence
  Cyclic GFR-binding peptide
RIKPHQGQHYHYKLVKPKRGVKYLISIPS

SEQ ID NO: 129039 - protein, 29 aa, Artificial Sequence
  Cyclic GFR-binding peptide
RIKPHQGQHEYKFKIKPTKGILYLISIPE

SEQ ID NO: 129040 - protein, 29 aa, Artificial Sequence
  Cyclic GFR-binding peptide
RIKPHQGQHEYKFKVVNKNEDLYLISIPE

SEQ ID NO: 129041 - protein, 29 aa, Artificial Sequence
  Cyclic GFR-binding peptide
RIKPHQGQHPIKGYVKPTRGVFYLINIPS

SEQ ID NO: 129042 - protein, 29 aa, Artificial Sequence
  Cyclic GFR-binding peptide
RIKPHQGQHPIKGYVVKENEDFYLMNIPS

SEQ ID NO: 129043 - protein, 29 aa, Artificial Sequence
  Cyclic GFR-binding peptide
RIKPHQGQHYHYKLYTVVGKDKYLISIPS

SEQ ID NO: 129044 - protein, 29 aa, Artificial Sequence
  Cyclic GFR-binding peptide
RIKPHQGQHEYKFKLLVRGNDLYLMSIPE

SEQ ID NO: 129045 - protein, 29 aa, Artificial Sequence
  Cyclic GFR-binding peptide
RIKPHQGQHRYKKLVKPKRGVFYLISIAN

SEQ ID NO: 129046 - protein, 29 aa, Artificial Sequence
  Cyclic GFR-binding peptide
RIKPHQGQHPIKGYTPVGMDDFYLVNIPS

SEQ ID NO: 129047 - protein, 29 aa, Artificial Sequence
  Cyclic GFR-binding peptide
RIKPHQGQHYHYKLVVNKNEDKYLISIPS

SEQ ID NO: 129048 - protein, 29 aa, Artificial Sequence
  Cyclic GFR-binding peptide
RIKPHQGQHYHYKLIVNSSDDKYLVSIPS

SEQ ID NO: 129049 - protein, 29 aa, Artificial Sequence
  Cyclic GFR-binding peptide
RIKPHQGQHPIKGYIVNSSDDFYLVNIPS

SEQ ID NO: 129050 - protein, 29 aa, Artificial Sequence
  Cyclic GFR-binding peptide
RIKPHQGQHRYKKLYTVVGKDFYLISIAN

SEQ ID NO: 129051 - protein, 29 aa, Artificial Sequence
  Cyclic GFR-binding peptide
RIKPHQGQHRHKRLLLVRGNDYYLMSTAS

SEQ ID NO: 129052 - protein, 29 aa, Artificial Sequence
  Cyclic GFR-binding peptide
RIKPHQGQHYHYKLLLVRGNDKYLMSIPS

SEQ ID NO: 129053 - protein, 29 aa, Artificial Sequence
  Cyclic GFR-binding peptide
RIKPHQGQHRYKKLIVNSSDDFYLVSIAN

SEQ ID NO: 129054 - protein, 29 aa, Artificial Sequence
  Cyclic GFR-binding peptide
RIKPHQGQHRHKRLVVNKNEDYYLISTAS

SEQ ID NO: 129055 - protein, 29 aa, Artificial Sequence
  Cyclic GFR-binding peptide
RIKPHQGQHRHKRLIKPTKGIYYLISTAS

SEQ ID NO: 129056 - protein, 29 aa, Artificial Sequence
  Cyclic GFR-binding peptide
RIKPHQGQHPIKGYYTVVGKDFYLINIPS

SEQ ID NO: 129057 - protein, 29 aa, Artificial Sequence
  Cyclic GFR-binding peptide
RIKPHQGQHYHYKLTPVGMDDKYLVSIPS

SEQ ID NO: 129058 - protein, 29 aa, Artificial Sequence
  Cyclic GFR-binding peptide
RIKPHQGQHRHKRLIVNNSSDYYLVSTAS

SEQ ID NO: 129059 - protein, 29 aa, Artificial Sequence
  Cyclic GFR-binding peptide
RIKPHQGQHRYKKLLLVRGNDFYLMSIAN

SEQ ID NO: 129060 - protein, 29 aa, Artificial Sequence
  Cyclic GFR-binding peptide
RIKPHQGQHYHYKLVKPTRGVKYLISIPS

SEQ ID NO: 129061 - protein, 29 aa, Artificial Sequence
  Cyclic GFR-binding peptide
RIKPHQGQHRHKRLIVNSSDDYYLVSTAS

SEQ ID NO: 129062 - protein, 29 aa, Artificial Sequence
  Cyclic GFR-binding peptide
RIKPHQGQHPIKGYLLVRGNDFYLMNIPS

SEQ ID NO: 129063 - protein, 29 aa, Artificial Sequence
  Cyclic GFR-binding peptide
RIKPHQGQHRYKKLVVNKNEDFYLISIAN

SEQ ID NO: 129064 - protein, 29 aa, Artificial Sequence
  Cyclic GFR-binding peptide
RIKPHQGQHEYKFKVVKDYEDLYLMSIPE

SEQ ID NO: 129065 - protein, 29 aa, Artificial Sequence
  Cyclic GFR-binding peptide
RIKPHQGQHPIKGYVVNKNEDFYLINIPS

SEQ ID NO: 129066 - protein, 29 aa, Artificial Sequence
  Cyclic GFR-binding peptide
RIKPHQGQHPIKGYIKPTKGIFYLINIPS

SEQ ID NO: 129067 - protein, 29 aa, Artificial Sequence
  Cyclic GFR-binding peptide
RIKPHQGQHEYKFKVVNNAADLYLISIPE

SEQ ID NO: 129068 - protein, 29 aa, Artificial Sequence
  Cyclic GFR-binding peptide
RIKPHQGQHRHKRLYTVVGKDYYLISTAS

SEQ ID NO: 129069 - protein, 29 aa, Artificial Sequence
  Cyclic GFR-binding peptide
RIKPHQGQHRYKKLIKPTKGIFYLISIAN

SEQ ID NO: 129070 - protein, 29 aa, Artificial Sequence
  Cyclic GFR-binding peptide
RIKPHQGQHPIKGYVVKDYEDFYLMNIPS

SEQ ID NO: 129071 - protein, 29 aa, Artificial Sequence
  Cyclic GFR-binding peptide
RIKPHQGQHEYKFKVVNNASDLYLISIPE

SEQ ID NO: 129072 - protein, 29 aa, Artificial Sequence
  Cyclic GFR-binding peptide
RIKPHQGQHRYKKLVKPTRGVFYLISIAN

SEQ ID NO: 129073 - protein, 29 aa, Artificial Sequence
  Cyclic GFR-binding peptide
RIKPHQGQHRHKRLVVKENEDYYLMSTAS

SEQ ID NO: 129074 - protein, 29 aa, Artificial Sequence
  Cyclic GFR-binding peptide
RIKPHQGQHYHYKLIKPTKGIKYLISIPS

SEQ ID NO: 129075 - protein, 29 aa, Artificial Sequence
  Cyclic GFR-binding peptide
RIKPHQGQHYHYKLVVKENEDKYLMSIPS

SEQ ID NO: 129076 - protein, 29 aa, Artificial Sequence
  Cyclic GFR-binding peptide
RIKPHQGQHRHKRLIIQQKDNYYLMSTAS

SEQ ID NO: 129077 - protein, 29 aa, Artificial Sequence
  Cyclic GFR-binding peptide
RIKPHQGQHRYKKLVVKENEDFYLMSIAN

SEQ ID NO: 129078 - protein, 29 aa, Artificial Sequence
  Cyclic GFR-binding peptide
RIKPHQGQHRYKKLVVNNAADFYLISIAN

SEQ ID NO: 129079 - protein, 29 aa, Artificial Sequence
  Cyclic GFR-binding peptide
RIKPHQGQHEYKFKIIQQKDNLYLMSIPE

SEQ ID NO: 129080 - protein, 29 aa, Artificial Sequence
  Cyclic GFR-binding peptide
RIKPHQGQHRYKKLTPVGMDDFYLVSIAN

SEQ ID NO: 129081 - protein, 29 aa, Artificial Sequence
  Cyclic GFR-binding peptide
RIKPHQGQHYHYKLVVNNAADKYLISIPS

SEQ ID NO: 129082 - protein, 29 aa, Artificial Sequence
  Cyclic GFR-binding peptide
RIKPHQGQHPIKGYIVNNSSDFYLVNIPS

SEQ ID NO: 129083 - protein, 29 aa, Artificial Sequence
  Cyclic GFR-binding peptide
RIKPHQGQHPIKGYVKPKRGVFYLINIPS

SEQ ID NO: 129084 - protein, 29 aa, Artificial Sequence
  Cyclic GFR-binding peptide
RIKPHQGQHRYKKLIIQQKDNFYLMSIAN

SEQ ID NO: 129085 - protein, 29 aa, Artificial Sequence
  Cyclic GFR-binding peptide
RIKPHQGQHPIKGYIIQQKDNFYLMNIPS

SEQ ID NO: 129086 - protein, 29 aa, Artificial Sequence
  Cyclic GFR-binding peptide
RIKPHQGQHRYKKLIVNNSSDFYLVSIAN

SEQ ID NO: 129087 - protein, 29 aa, Artificial Sequence
  Cyclic GFR-binding peptide
RIKPHQGQHPIKGYVVNNAADFYLINIPS

SEQ ID NO: 129088 - protein, 29 aa, Artificial Sequence
  Cyclic GFR-binding peptide
RIKPHQGQHRHKRLVKPTRGVYYLISTAS

SEQ ID NO: 129089 - protein, 29 aa, Artificial Sequence
  Cyclic GFR-binding peptide
RIKPHQGQHEYKFKIVNNSSDLYLVSIPE

SEQ ID NO: 129090 - protein, 29 aa, Artificial Sequence
  Cyclic GFR-binding peptide
RIKPHQGQHRHKRLVVNNASDYYLISTAS

SEQ ID NO: 129091 - protein, 29 aa, Artificial Sequence
  Cyclic GFR-binding peptide
RIKPHQGQHRHKRLTPVGMDDYYLVSTAS

SEQ ID NO: 129092 - protein, 29 aa, Artificial Sequence
  Cyclic GFR-binding peptide
RIKPHQGQHYHYKLIVNNSSDKYLVSIPS

SEQ ID NO: 129093 - protein, 29 aa, Artificial Sequence
  Cyclic GFR-binding peptide
RIKPHQGQHYHYKLVVNNASDKYLISIPS

SEQ ID NO: 129094 - protein, 29 aa, Artificial Sequence
  Cyclic GFR-binding peptide
RIKPHQGQHEYKFKIVNSSDDLYLVSIPE

SEQ ID NO: 129095 - protein, 29 aa, Artificial Sequence
  Cyclic GFR-binding peptide
RIKPHQGQHEYKFKVKPKRGVLYLISIPE

SEQ ID NO: 129096 - protein, 29 aa, Artificial Sequence
  Cyclic GFR-binding peptide
RIKPHQGQHRHKRLVVKDYEDYYLMSTAS

SEQ ID NO: 129097 - protein, 29 aa, Artificial Sequence
  Cyclic GFR-binding peptide
RIKPHQGQHEYKFKVVKENEDLYLMSIPE

SEQ ID NO: 129098 - protein, 29 aa, Artificial Sequence
  Cyclic GFR-binding peptide
RIKPHQGQHEYKFKYTVVGKDLYLISIPE

SEQ ID NO: 129099 - protein, 29 aa, Artificial Sequence
  Cyclic GFR-binding peptide
RIKPHQGQHPIKGYVVNNASDFYLINIPS

SEQ ID NO: 129100 - protein, 29 aa, Artificial Sequence
  Cyclic GFR-binding peptide
RIKPHQGQHYHYKLIIQQKDNKYLMSIPS

SEQ ID NO: 129101 - protein, 29 aa, Artificial Sequence
  Cyclic GFR-binding peptide
RIKPHQGQHRYKKLVVNNASDFYLISIAN

SEQ ID NO: 129102 - protein, 29 aa, Artificial Sequence
  Cyclic GFR-binding peptide
RIKPHQGQHRHKRLVVNNAADYYLISTAS

SEQ ID NO: 129103 - protein, 29 aa, Artificial Sequence
  Cyclic GFR-binding peptide
EPISILYLVGRTPKVKFKYERIKPHQGQH

SEQ ID NO: 129104 - protein, 29 aa, Artificial Sequence
  Cyclic GFR-binding peptide
SPISMLYKDEYDKVVLKYHYRIKPHQGQH

SEQ ID NO: 129105 - protein, 29 aa, Artificial Sequence
  Cyclic GFR-binding peptide
EPISVLYLDDMGVPTKFKYERIKPHQGQH

SEQ ID NO: 129106 - protein, 29 aa, Artificial Sequence
  Cyclic GFR-binding peptide
NAISMLYFDEYDKVVLKKYRRIKPHQGQH

SEQ ID NO: 129107 - protein, 29 aa, Artificial Sequence
  Cyclic GFR-binding peptide
SATSILYYVGRKPKVLRKHRRIKPHQGQH

SEQ ID NO: 129108 - protein, 29 aa, Artificial Sequence
  Cyclic GFR-binding peptide
SPISILYKVGRKPKVLKYHYRIKPHQGQH

SEQ ID NO: 129109 - protein, 29 aa, Artificial Sequence
  Cyclic GFR-binding peptide
EPISILYLIGKTPKIKFKYERIKPHQGQH

SEQ ID NO: 129110 - protein, 29 aa, Artificial Sequence
  Cyclic GFR-binding peptide
EPISILYLDENKNVVKFKYERIKPHQGQH

SEQ ID NO: 129111 - protein, 29 aa, Artificial Sequence
  Cyclic GFR-binding peptide
SPINILYFVGRTPKVYGKIPRIKPHQGQH

SEQ ID NO: 129112 - protein, 29 aa, Artificial Sequence
  Cyclic GFR-binding peptide
SPINMLYFDENEKVVYGKIPRIKPHQGQH

SEQ ID NO: 129113 - protein, 29 aa, Artificial Sequence
  Cyclic GFR-binding peptide
SPISILYKDKGVVTYLKYHYRIKPHQGQH

SEQ ID NO: 129114 - protein, 29 aa, Artificial Sequence
  Cyclic GFR-binding peptide
EPISMLYLDNGRVLLKFKYERIKPHQGQH

SEQ ID NO: 129115 - protein, 29 aa, Artificial Sequence
  Cyclic GFR-binding peptide
NAISILYFVGRKPKVLKKYRRIKPHQGQH

SEQ ID NO: 129116 - protein, 29 aa, Artificial Sequence
  Cyclic GFR-binding peptide
SPINVLYFDDMGVPTYGKIPRIKPHQGQH

SEQ ID NO: 129117 - protein, 29 aa, Artificial Sequence
  Cyclic GFR-binding peptide
SPISILYKDENKNVVLKYHYRIKPHQGQH

SEQ ID NO: 129118 - protein, 29 aa, Artificial Sequence
  Cyclic GFR-binding peptide
SPISVLYKDDSSNVILKYHYRIKPHQGQH

SEQ ID NO: 129119 - protein, 29 aa, Artificial Sequence
  Cyclic GFR-binding peptide
SPINVLYFDDSSNVIYGKIPRIKPHQGQH

SEQ ID NO: 129120 - protein, 29 aa, Artificial Sequence
  Cyclic GFR-binding peptide
NAISILYFDKGVVTYLKKYRRIKPHQGQH

SEQ ID NO: 129121 - protein, 29 aa, Artificial Sequence
  Cyclic GFR-binding peptide
SATSMLYYDNGRVLLLRKHRRIKPHQGQH

SEQ ID NO: 129122 - protein, 29 aa, Artificial Sequence
  Cyclic GFR-binding peptide
SPISMLYKDNGRVLLLKYHYRIKPHQGQH

SEQ ID NO: 129123 - protein, 29 aa, Artificial Sequence
  Cyclic GFR-binding peptide
NAISVLYFDDSSNVILKKYRRIKPHQGQH

SEQ ID NO: 129124 - protein, 29 aa, Artificial Sequence
  Cyclic GFR-binding peptide
SATSILYYDENKNVVLRKHRRIKPHQGQH

SEQ ID NO: 129125 - protein, 29 aa, Artificial Sequence
  Cyclic GFR-binding peptide
SATSILYYIGKTPKILRKHRRIKPHQGQH

SEQ ID NO: 129126 - protein, 29 aa, Artificial Sequence
  Cyclic GFR-binding peptide
SPINILYFDKGVVTYYGKIPRIKPHQGQH

SEQ ID NO: 129127 - protein, 29 aa, Artificial Sequence
  Cyclic GFR-binding peptide
SPISVLYKDDMGVPTLKYHYRIKPHQGQH

SEQ ID NO: 129128 - protein, 29 aa, Artificial Sequence
  Cyclic GFR-binding peptide
SATSVLYYDSSNNVILRKHRRIKPHQGQH

SEQ ID NO: 129129 - protein, 29 aa, Artificial Sequence
  Cyclic GFR-binding peptide
NAISMLYFDNGRVLLLKKYRRIKPHQGQH

SEQ ID NO: 129130 - protein, 29 aa, Artificial Sequence
  Cyclic GFR-binding peptide
SPISILYKVGRTPKVLKYHYRIKPHQGQH

SEQ ID NO: 129131 - protein, 29 aa, Artificial Sequence
  Cyclic GFR-binding peptide
SATSVLYYDDSSNVILRKHRRIKPHQGQH

SEQ ID NO: 129132 - protein, 29 aa, Artificial Sequence
  Cyclic GFR-binding peptide
SPINMLYFDNGRVLLYGKIPRIKPHQGQH

SEQ ID NO: 129133 - protein, 29 aa, Artificial Sequence
  Cyclic GFR-binding peptide
NAISILYFDENKNVVLKKYRRIKPHQGQH

SEQ ID NO: 129134 - protein, 29 aa, Artificial Sequence
  Cyclic GFR-binding peptide
EPISMLYLDEYDKVVKFKYERIKPHQGQH

SEQ ID NO: 129135 - protein, 29 aa, Artificial Sequence
  Cyclic GFR-binding peptide
SPINILYFDENKNVVYGKIPRIKPHQGQH

SEQ ID NO: 129136 - protein, 29 aa, Artificial Sequence
  Cyclic GFR-binding peptide
SPINILYFIGKTPKIYGKIPRIKPHQGQH

SEQ ID NO: 129137 - protein, 29 aa, Artificial Sequence
  Cyclic GFR-binding peptide
EPISILYLDAANNVVKFKYERIKPHQGQH

SEQ ID NO: 129138 - protein, 29 aa, Artificial Sequence
  Cyclic GFR-binding peptide
SATSILYYDKGVVTYLRKHRRIKPHQGQH

SEQ ID NO: 129139 - protein, 29 aa, Artificial Sequence
  Cyclic GFR-binding peptide
NAISILYFIGKTPKILKKYRRIKPHQGQH

SEQ ID NO: 129140 - protein, 29 aa, Artificial Sequence
  Cyclic GFR-binding peptide
SPINMLYFDEYDKVVYGKIPRIKPHQGQH

SEQ ID NO: 129141 - protein, 29 aa, Artificial Sequence
  Cyclic GFR-binding peptide
EPISILYLDSANNVVKFKYERIKPHQGQH

SEQ ID NO: 129142 - protein, 29 aa, Artificial Sequence
  Cyclic GFR-binding peptide
NAISILYFVGRTPKVLKKYRRIKPHQGQH

SEQ ID NO: 129143 - protein, 29 aa, Artificial Sequence
  Cyclic GFR-binding peptide
SATSMLYYDENEKVVLRKHRRIKPHQGQH

SEQ ID NO: 129144 - protein, 29 aa, Artificial Sequence
  Cyclic GFR-binding peptide
SPISILYKIGKTPKILKYHYRIKPHQGQH

SEQ ID NO: 129145 - protein, 29 aa, Artificial Sequence
  Cyclic GFR-binding peptide
SPISMLYKDENEKVVLKYHYRIKPHQGQH

SEQ ID NO: 129146 - protein, 29 aa, Artificial Sequence
  Cyclic GFR-binding peptide
SATSMLYYNDKQQIILRKHRRIKPHQGQH

SEQ ID NO: 129147 - protein, 29 aa, Artificial Sequence
  Cyclic GFR-binding peptide
NAISMLYFDENEKVVLKKYRRIKPHQGQH

SEQ ID NO: 129148 - protein, 29 aa, Artificial Sequence
  Cyclic GFR-binding peptide
NAISILYFDAANNVVLKKYRRIKPHQGQH

SEQ ID NO: 129149 - protein, 29 aa, Artificial Sequence
  Cyclic GFR-binding peptide
EPISMLYLNDKQQIIKFKYERIKPHQGQH

SEQ ID NO: 129150 - protein, 29 aa, Artificial Sequence
  Cyclic GFR-binding peptide
NAISVLYFDDMGVPTLKKYRRIKPHQGQH

SEQ ID NO: 129151 - protein, 29 aa, Artificial Sequence
  Cyclic GFR-binding peptide
SPISILYKDAANNVVLKYHYRIKPHQGQH

SEQ ID NO: 129152 - protein, 29 aa, Artificial Sequence
  Cyclic GFR-binding peptide
SPINVLYFDSSNNVIYGKIPRIKPHQGQH

SEQ ID NO: 129153 - protein, 29 aa, Artificial Sequence
  Cyclic GFR-binding peptide
SPINILYFVGRKPKVYGKIPRIKPHQGQH

SEQ ID NO: 129154 - protein, 29 aa, Artificial Sequence
  Cyclic GFR-binding peptide
NAISMLYFNDKQQIILKKYRRIKPHQGQH

SEQ ID NO: 129155 - protein, 29 aa, Artificial Sequence
  Cyclic GFR-binding peptide
SPINMLYFNDKQQIIYGKIPRIKPHQGQH

SEQ ID NO: 129156 - protein, 29 aa, Artificial Sequence
  Cyclic GFR-binding peptide
NAISVLYFDSSNNVILKKYRRIKPHQGQH

SEQ ID NO: 129157 - protein, 29 aa, Artificial Sequence
  Cyclic GFR-binding peptide
SPINILYFDAANNVVYGKIPRIKPHQGQH

SEQ ID NO: 129158 - protein, 29 aa, Artificial Sequence
  Cyclic GFR-binding peptide
SATSILYYVGRTPKVLRKHRRIKPHQGQH

SEQ ID NO: 129159 - protein, 29 aa, Artificial Sequence
  Cyclic GFR-binding peptide
EPISVLYLDSSNNVIKFKYERIKPHQGQH

SEQ ID NO: 129160 - protein, 29 aa, Artificial Sequence
  Cyclic GFR-binding peptide
SATSILYYDSANNVVLRKHRRIKPHQGQH

SEQ ID NO: 129161 - protein, 29 aa, Artificial Sequence
  Cyclic GFR-binding peptide
SATSVLYYDDMGVPTLRKHRRIKPHQGQH

SEQ ID NO: 129162 - protein, 29 aa, Artificial Sequence
  Cyclic GFR-binding peptide
SPISVLYKDSSNNVILKYHYRIKPHQGQH

SEQ ID NO: 129163 - protein, 29 aa, Artificial Sequence
  Cyclic GFR-binding peptide
SPISILYKDSANNVVLKYHYRIKPHQGQH

SEQ ID NO: 129164 - protein, 29 aa, Artificial Sequence
  Cyclic GFR-binding peptide
EPISVLYLDDSSNVIKFKYERIKPHQGQH

SEQ ID NO: 129165 - protein, 29 aa, Artificial Sequence
  Cyclic GFR-binding peptide
EPISILYLVGRKPKVKFKYERIKPHQGQH

SEQ ID NO: 129166 - protein, 29 aa, Artificial Sequence
  Cyclic GFR-binding peptide
SATSMLYYDEYDKVVLRKHRRIKPHQGQH

SEQ ID NO: 129167 - protein, 29 aa, Artificial Sequence
  Cyclic GFR-binding peptide
EPISMLYLDENEKVVKFKYERIKPHQGQH

SEQ ID NO: 129168 - protein, 29 aa, Artificial Sequence
  Cyclic GFR-binding peptide
EPISILYLDKGVVTYKFKYERIKPHQGQH

SEQ ID NO: 129169 - protein, 29 aa, Artificial Sequence
  Cyclic GFR-binding peptide
SPINILYFDSANNVVYGKIPRIKPHQGQH

SEQ ID NO: 129170 - protein, 29 aa, Artificial Sequence
  Cyclic GFR-binding peptide
SPISMLYKNDKQQIILKYHYRIKPHQGQH

SEQ ID NO: 129171 - protein, 29 aa, Artificial Sequence
  Cyclic GFR-binding peptide
NAISILYFDSANNVVLKKYRRIKPHQGQH

SEQ ID NO: 129172 - protein, 29 aa, Artificial Sequence
  Cyclic GFR-binding peptide
SATSILYYDAANNVVLRKHRRIKPHQGQH

SEQ ID NO: 129173 - protein, 29 aa, Artificial Sequence
  Cyclic GFR-binding peptide
RIKPHQGQHSMEGIIIQQKDNMIQMTINS

SEQ ID NO: 129174 - protein, 29 aa, Artificial Sequence
  Cyclic GFR-binding peptide
RIKPHQGQHSMEGIIVNSSDDMIQVTINS

SEQ ID NO: 129175 - protein, 29 aa, Artificial Sequence
  Cyclic GFR-binding peptide
RIKPHQGQHSMEGLVKPKRGVMIQITINS

SEQ ID NO: 129176 - protein, 29 aa, Artificial Sequence
  Cyclic GFR-binding peptide
RIKPHQGQHSMEGLVVNNASDMIQITINS

SEQ ID NO: 129177 - protein, 31 aa, Artificial Sequence; identical to SEQ ID NO: 128653
  Cyclic GFR-binding peptide

SEQ ID NO: 129178 - protein, 29 aa, Artificial Sequence
  Cyclic GFR-binding peptide
RIKPHQGQHSMEGILLVRGNDMIQMTINS

SEQ ID NO: 129179 - protein, 31 aa, Artificial Sequence; identical to SEQ ID NO: 128655
  Cyclic GFR-binding peptide

SEQ ID NO: 129180 - protein, 29 aa, Artificial Sequence
  Cyclic GFR-binding peptide
RIKPHQGQHSMEGLIKPTKGIMIQITINS

SEQ ID NO: 129181 - protein, 29 aa, Artificial Sequence
  Cyclic GFR-binding peptide
RIKPHQGQHSMEGLIVNSSDDMIQVTINS

SEQ ID NO: 129182 - protein, 31 aa, Artificial Sequence; identical to SEQ ID NO: 128658
  Cyclic GFR-binding peptide

SEQ ID NO: 129183 - protein, 29 aa, Artificial Sequence
  Cyclic GFR-binding peptide
RIKPHQGQHSMEGIVVNNASDMIQITINS

SEQ ID NO: 129184 - protein, 31 aa, Artificial Sequence; identical to SEQ ID NO: 128652
  Cyclic GFR-binding peptide

SEQ ID NO: 129185 - protein, 29 aa, Artificial Sequence
  Cyclic GFR-binding peptide
RIKPHQGQHSMEGIVKPKRGVMIQITINS

SEQ ID NO: 129186 - protein, 29 aa, Artificial Sequence
  Cyclic GFR-binding peptide
RIKPHQGQHSMEGIVKPTRGVMIQITINS

SEQ ID NO: 129187 - protein, 29 aa, Artificial Sequence
  Cyclic GFR-binding peptide
RIKPHQGQHSMEGLVVNNAADMIQITINS

SEQ ID NO: 129188 - protein, 29 aa, Artificial Sequence
  Cyclic GFR-binding peptide
RIKPHQGQHSMEGLLLVRGNDMIQMTINS

SEQ ID NO: 129189 - protein, 29 aa, Artificial Sequence
  Cyclic GFR-binding peptide
RIKPHQGQHSMEGIIKPTKGIMIQITINS

SEQ ID NO: 129190 - protein, 29 aa, Artificial Sequence
  Cyclic GFR-binding peptide
RIKPHQGQHSMEGLIIQQKDNMIQMTINS

SEQ ID NO: 129191 - protein, 31 aa, Artificial Sequence; identical to SEQ ID NO: 128654
  Cyclic GFR-binding peptide

SEQ ID NO: 129192 - protein, 29 aa, Artificial Sequence
  Cyclic GFR-binding peptide
RIKPHQGQHSMEGIVVNNAADMIQITINS

SEQ ID NO: 129193 - protein, 31 aa, Artificial Sequence; identical to SEQ ID NO: 128656
  Cyclic GFR-binding peptide

SEQ ID NO: 129194 - protein, 29 aa, Artificial Sequence
  Cyclic GFR-binding peptide
RIKPHQGQHSMEGLVKPTRGVMIQITINS

SEQ ID NO: 129195 - protein, 29 aa, Artificial Sequence
  Cyclic GFR-binding peptide
SNITMQIMNDKQQIIIGEMSRIKPHQGQH

SEQ ID NO: 129196 - protein, 29 aa, Artificial Sequence
  Cyclic GFR-binding peptide
SNITVQIMDDSSNVIIGEMSRIKPHQGQH

SEQ ID NO: 129197 - protein, 29 aa, Artificial Sequence
  Cyclic GFR-binding peptide
SNITIQIMVGRKPKVLGEMSRIKPHQGQH

SEQ ID NO: 129198 - protein, 29 aa, Artificial Sequence
  Cyclic GFR-binding peptide
SNITIQIMDSANNVVLGEMSRIKPHQGQH

SEQ ID NO: 129199 - protein, 31 aa, Artificial Sequence; identical to SEQ ID NO: 128665
  Cyclic GFR-binding peptide

SEQ ID NO: 129200 - protein, 29 aa, Artificial Sequence
  Cyclic GFR-binding peptide
SNITMQIMDNGRVLLIGEMSRIKPHQGQH

SEQ ID NO: 129201 - protein, 31 aa, Artificial Sequence; identical to SEQ ID NO: 128667
  Cyclic GFR-binding peptide

SEQ ID NO: 129202 - protein, 29 aa, Artificial Sequence
  Cyclic GFR-binding peptide
SNITIQIMIGKTPKILGEMSRIKPHQGQH

SEQ ID NO: 129203 - protein, 29 aa, Artificial Sequence
  Cyclic GFR-binding peptide
SNITVQIMDDSSNVILGEMSRIKPHQGQH

SEQ ID NO: 129204 - protein, 31 aa, Artificial Sequence; identical to SEQ ID NO: 128670
  Cyclic GFR-binding peptide

SEQ ID NO: 129205 - protein, 29 aa, Artificial Sequence
  Cyclic GFR-binding peptide
SNITIQIMDSANNVVIGEMSRIKPHQGQH

SEQ ID NO: 129206 - protein, 31 aa, Artificial Sequence; identical to SEQ ID NO: 128664
  Cyclic GFR-binding peptide

SEQ ID NO: 129207 - protein, 29 aa, Artificial Sequence
  Cyclic GFR-binding peptide
SNITIQIMVGRKPKVIGEMSRIKPHQGQH

SEQ ID NO: 129208 - protein, 29 aa, Artificial Sequence
  Cyclic GFR-binding peptide
SNITIQIMVGRTPKVIGEMSRIKPHQGQH

SEQ ID NO: 129209 - protein, 29 aa, Artificial Sequence
  Cyclic GFR-binding peptide
SNITIQIMDAANNVVLGEMSRIKPHQGQH

SEQ ID NO: 129210 - protein, 29 aa, Artificial Sequence
  Cyclic GFR-binding peptide
SNITMQIMDNGRVLLLGEMSRIKPHQGQH

SEQ ID NO: 129211 - protein, 29 aa, Artificial Sequence
  Cyclic GFR-binding peptide
SNITIQIMIGKTPKIIGEMSRIKPHQGQH

SEQ ID NO: 129212 - protein, 29 aa, Artificial Sequence
  Cyclic GFR-binding peptide
SNITMQIMNDKQQIILGEMSRIKPHQGQH

SEQ ID NO: 129213 - protein, 31 aa, Artificial Sequence; identical to SEQ ID NO: 128666
  Cyclic GFR-binding peptide

SEQ ID NO: 129214 - protein, 29 aa, Artificial Sequence
  Cyclic GFR-binding peptide
SNITIQIMDAANNVVIGEMSRIKPHQGQH

SEQ ID NO: 129215 - protein, 31 aa, Artificial Sequence; identical to SEQ ID NO: 128668
  Cyclic GFR-binding peptide

SEQ ID NO: 129216 - protein, 29 aa, Artificial Sequence
  Cyclic GFR-binding peptide
SNITIQIMVGRTPKVLGEMSRIKPHQGQH

SEQ ID NO: 129217 - protein, 29 aa, Artificial Sequence
  Cyclic GFR-binding peptide
RIKPHQGQHRYKKLIKPTKGIFYLISIAN

SEQ ID NO: 129218 - protein, 29 aa, Artificial Sequence
  Cyclic GFR-binding peptide
RIKPHQGQHQYNKLVVNKNEDLYLISIAS

SEQ ID NO: 129219 - protein, 29 aa, Artificial Sequence
  Cyclic GFR-binding peptide
RIKPHQGQHQYNKLVVNNAADLYLISIAS

SEQ ID NO: 129220 - protein, 29 aa, Artificial Sequence
  Cyclic GFR-binding peptide
RIKPHQGQHQYNKLIVNNSSDLYLVSIAS

SEQ ID NO: 129221 - protein, 29 aa, Artificial Sequence
  Cyclic GFR-binding peptide
RIKPHQGQHRYKKLVVKDYEDFYLMSIAN

SEQ ID NO: 129222 - protein, 29 aa, Artificial Sequence
  Cyclic GFR-binding peptide
RIKPHQGQHRYKKLVKPTRGVFYLISIAN

SEQ ID NO: 129223 - protein, 29 aa, Artificial Sequence
  Cyclic GFR-binding peptide
RIKPHQGQHQYNKLIIQQKDNLYLMSIAS

SEQ ID NO: 129224 - protein, 29 aa, Artificial Sequence
  Cyclic GFR-binding peptide
RIKPHQGQHQYNKLLLVRGNDLYLMSIAS

SEQ ID NO: 129225 - protein, 29 aa, Artificial Sequence
  Cyclic GFR-binding peptide
RIKPHQGQHQYNKLVKPTRGVLYLISIAS

SEQ ID NO: 129226 - protein, 29 aa, Artificial Sequence
  Cyclic GFR-binding peptide
RIKPHQGQHRYKKLVVKENEDFYLMSIAN

SEQ ID NO: 129227 - protein, 29 aa, Artificial Sequence
  Cyclic GFR-binding peptide
RIKPHQGQHRYKKLVVNNAADFYLISIAN

SEQ ID NO: 129228 - protein, 29 aa, Artificial Sequence
  Cyclic GFR-binding peptide
RIKPHQGQHQYNKLTPVGMDDLYLVSIAS

SEQ ID NO: 129229 - protein, 29 aa, Artificial Sequence
  Cyclic GFR-binding peptide
RIKPHQGQHRYKKLTPVGMDDFYLVSIAN

SEQ ID NO: 129230 - protein, 29 aa, Artificial Sequence
  Cyclic GFR-binding peptide
RIKPHQGQHRYKKLVKPKRGVFYLISIAN

SEQ ID NO: 129231 - protein, 29 aa, Artificial Sequence
  Cyclic GFR-binding peptide
RIKPHQGQHQYNKLVVKENEDLYLMSIAS

SEQ ID NO: 129232 - protein, 29 aa, Artificial Sequence
  Cyclic GFR-binding peptide
RIKPHQGQHRYKKLIIQQKDNFYLMSIAN

SEQ ID NO: 129233 - protein, 29 aa, Artificial Sequence
  Cyclic GFR-binding peptide
RIKPHQGQHQYNKLVKPKRGVLYLISIAS

SEQ ID NO: 129234 - protein, 29 aa, Artificial Sequence
  Cyclic GFR-binding peptide
RIKPHQGQHRYKKLIVNNSSDFYLVSIAN

SEQ ID NO: 129235 - protein, 29 aa, Artificial Sequence
  Cyclic GFR-binding peptide
RIKPHQGQHRYKKLYTVVGKDFYLISIAN

SEQ ID NO: 129236 - protein, 29 aa, Artificial Sequence
  Cyclic GFR-binding peptide
RIKPHQGQHRYKKLIVNSSDDFYLVSIAN

SEQ ID NO: 129237 - protein, 29 aa, Artificial Sequence
  Cyclic GFR-binding peptide
RIKPHQGQHRYKKLLLVRGNDFYLMSIAN

SEQ ID NO: 129238 - protein, 29 aa, Artificial Sequence
  Cyclic GFR-binding peptide
RIKPHQGQHQYNKLVVNNASDLYLISIAS

SEQ ID NO: 129239 - protein, 29 aa, Artificial Sequence
  Cyclic GFR-binding peptide
RIKPHQGQHQYNKLIKPTKGILYLISIAS

SEQ ID NO: 129240 - protein, 29 aa, Artificial Sequence
  Cyclic GFR-binding peptide
RIKPHQGQHRYKKLVVNKNEDFYLISIAN

SEQ ID NO: 129241 - protein, 29 aa, Artificial Sequence
  Cyclic GFR-binding peptide
RIKPHQGQHQYNKLYTVVGKDLYLISIAS

SEQ ID NO: 129242 - protein, 29 aa, Artificial Sequence
  Cyclic GFR-binding peptide
RIKPHQGQHQYNKLVVKDYEDLYLMSIAS

SEQ ID NO: 129243 - protein, 29 aa, Artificial Sequence
  Cyclic GFR-binding peptide
RIKPHQGQHRYKKLVVNNASDFYLISIAN

SEQ ID NO: 129244 - protein, 29 aa, Artificial Sequence
  Cyclic GFR-binding peptide
RIKPHQGQHQYNKLIVNSSDDLYLVSIAS

SEQ ID NO: 129245 - protein, 29 aa, Artificial Sequence
  Cyclic GFR-binding peptide
NAISILYFIGKTPKILKKYRRIKPHQGQH

SEQ ID NO: 129246 - protein, 29 aa, Artificial Sequence
  Cyclic GFR-binding peptide
SAISILYLDENKNVVLKNYQRIKPHQGQH

SEQ ID NO: 129247 - protein, 29 aa, Artificial Sequence
  Cyclic GFR-binding peptide
SAISILYLDAANNVVLKNYQRIKPHQGQH

SEQ ID NO: 129248 - protein, 29 aa, Artificial Sequence
  Cyclic GFR-binding peptide
SAISVLYLDSSNNVILKNYQRIKPHQGQH

SEQ ID NO: 129249 - protein, 29 aa, Artificial Sequence
  Cyclic GFR-binding peptide
NAISMLYFDEYDKVVLKKYRRIKPHQGQH

SEQ ID NO: 129250 - protein, 29 aa, Artificial Sequence
  Cyclic GFR-binding peptide
NAISILYFVGRTPKVLKKYRRIKPHQGQH

SEQ ID NO: 129251 - protein, 29 aa, Artificial Sequence
  Cyclic GFR-binding peptide
SAISMLYLNDKQQIILKNYQRIKPHQGQH

SEQ ID NO: 129252 - protein, 29 aa, Artificial Sequence
  Cyclic GFR-binding peptide
SAISMLYLDNGRVLLLKNYQRIKPHQGQH

SEQ ID NO: 129253 - protein, 29 aa, Artificial Sequence
  Cyclic GFR-binding peptide
SAISILYLVGRTPKVLKNYQRIKPHQGQH

SEQ ID NO: 129254 - protein, 29 aa, Artificial Sequence
  Cyclic GFR-binding peptide
NAISMLYFDENEKVVLKKYRRIKPHQGQH

SEQ ID NO: 129255 - protein, 29 aa, Artificial Sequence
  Cyclic GFR-binding peptide
NAISILYFDAANNVVLKKYRRIKPHQGQH

SEQ ID NO: 129256 - protein, 29 aa, Artificial Sequence
  Cyclic GFR-binding peptide
SAISVLYLDDMGVPTLKNYQRIKPHQGQH

SEQ ID NO: 129257 - protein, 29 aa, Artificial Sequence
  Cyclic GFR-binding peptide
NAISVLYFDDMGVPTLKKYRRIKPHQGQH

SEQ ID NO: 129258 - protein, 29 aa, Artificial Sequence
  Cyclic GFR-binding peptide
NAISILYFVGRKPKVLKKYRRIKPHQGQH

SEQ ID NO: 129259 - protein, 29 aa, Artificial Sequence
  Cyclic GFR-binding peptide
SAISMLYLDENEKVVLKNYQRIKPHQGQH

SEQ ID NO: 129260 - protein, 29 aa, Artificial Sequence
  Cyclic GFR-binding peptide
NAISMLYFNDKQQIILKKYRRIKPHQGQH

SEQ ID NO: 129261 - protein, 29 aa, Artificial Sequence
  Cyclic GFR-binding peptide
SAISILYLVGRKPKVLKNYQRIKPHQGQH

SEQ ID NO: 129262 - protein, 29 aa, Artificial Sequence
  Cyclic GFR-binding peptide
NAISVLYFDSSNNVILKKYRRIKPHQGQH

SEQ ID NO: 129263 - protein, 29 aa, Artificial Sequence
  Cyclic GFR-binding peptide
NAISILYFDKGVVTYLKKYRRIKPHQGQH

SEQ ID NO: 129264 - protein, 29 aa, Artificial Sequence
  Cyclic GFR-binding peptide
NAISVLYFDDSSNVILKKYRRIKPHQGQH

SEQ ID NO: 129265 - protein, 29 aa, Artificial Sequence
  Cyclic GFR-binding peptide
NAISMLYFDNGRVLLLKKYRRIKPHQGQH

SEQ ID NO: 129266 - protein, 29 aa, Artificial Sequence
  Cyclic GFR-binding peptide
SAISILYLDSANNVVLKNYQRIKPHQGQH

SEQ ID NO: 129267 - protein, 29 aa, Artificial Sequence
  Cyclic GFR-binding peptide
SAISILYLIGKTPKILKNYQRIKPHQGQH

SEQ ID NO: 129268 - protein, 29 aa, Artificial Sequence
  Cyclic GFR-binding peptide
NAISILYFDENKNVVLKKYRRIKPHQGQH

SEQ ID NO: 129269 - protein, 29 aa, Artificial Sequence
  Cyclic GFR-binding peptide
SAISILYLDKGVVTYLKNYQRIKPHQGQH

SEQ ID NO: 129270 - protein, 29 aa, Artificial Sequence
  Cyclic GFR-binding peptide
SAISMLYLDEYDKVVLKNYQRIKPHQGQH

SEQ ID NO: 129271 - protein, 29 aa, Artificial Sequence
  Cyclic GFR-binding peptide
NAISILYFDSANNVVLKKYRRIKPHQGQH

SEQ ID NO: 129272 - protein, 29 aa, Artificial Sequence
  Cyclic GFR-binding peptide
SAISVLYLDDSSNVILKNYQRIKPHQGQH

SEQ ID NO: 129273 - protein, 31 aa, Artificial Sequence; identical to SEQ ID NO: 128647
  Cyclic GFR-binding peptide

SEQ ID NO: 129274 - protein, 31 aa, Artificial Sequence; identical to SEQ ID NO: 128648
  Cyclic GFR-binding peptide

SEQ ID NO: 129275 - protein, 29 aa, Artificial Sequence
  Cyclic GFR-binding peptide
RIKPHQGQHVTAKKVKPTRGVIKRIQVPR

SEQ ID NO: 129276 - protein, 31 aa, Artificial Sequence; identical to SEQ ID NO: 128649
  Cyclic GFR-binding peptide

SEQ ID NO: 129277 - protein, 31 aa, Artificial Sequence; identical to SEQ ID NO: 128650
  Cyclic GFR-binding peptide

SEQ ID NO: 129278 - protein, 31 aa, Artificial Sequence; identical to SEQ ID NO: 128651
  Cyclic GFR-binding peptide

SEQ ID NO: 129279 - protein, 29 aa, Artificial Sequence
  Cyclic GFR-binding peptide
RIKPHQGQHVTAKKIKPTKGIIKRIQVPR

SEQ ID NO: 129280 - protein, 29 aa, Artificial Sequence
  Cyclic GFR-binding peptide
RIKPHQGQHVQVEKVKPKRGVVKAIKVSR

SEQ ID NO: 129281 - protein, 29 aa, Artificial Sequence
  Cyclic GFR-binding peptide
RIKPHQGQHVTAKKVKPKRGVIKRIQVPR

SEQ ID NO: 129282 - protein, 29 aa, Artificial Sequence
  Cyclic GFR-binding peptide
RIKPHQGQHVQVEKIKPTKGIVKAIKVSR

SEQ ID NO: 129283 - protein, 29 aa, Artificial Sequence
  Cyclic GFR-binding peptide
RIKPHQGQHVQVEKVKPTRGVVKAIKVSR

SEQ ID NO: 129284 - protein, 31 aa, Artificial Sequence; identical to SEQ ID NO: 128657
  Cyclic GFR-binding peptide

SEQ ID NO: 129285 - protein, 31 aa, Artificial Sequence; identical to SEQ ID NO: 128659
  Cyclic GFR-binding peptide

SEQ ID NO: 129286 - protein, 31 aa, Artificial Sequence; identical to SEQ ID NO: 128660
  Cyclic GFR-binding peptide

SEQ ID NO: 129287 - protein, 29 aa, Artificial Sequence
  Cyclic GFR-binding peptide
RPVQIRKIVGRTPKVKKATVRIKPHQGQH

SEQ ID NO: 129288 - protein, 31 aa, Artificial Sequence; identical to SEQ ID NO: 128661
  Cyclic GFR-binding peptide

SEQ ID NO: 129289 - protein, 31 aa, Artificial Sequence; identical to SEQ ID NO: 128662
  Cyclic GFR-binding peptide

SEQ ID NO: 129290 - protein, 31 aa, Artificial Sequence; identical to SEQ ID NO: 128663
  Cyclic GFR-binding peptide

SEQ ID NO: 129291 - protein, 29 aa, Artificial Sequence
  Cyclic GFR-binding peptide
RPVQIRKIIGKTPKIKKATVRIKPHQGQH

SEQ ID NO: 129292 - protein, 29 aa, Artificial Sequence
  Cyclic GFR-binding peptide
RSVKIAKVVGRKPKVKEVQVRIKPHQGQH

SEQ ID NO: 129293 - protein, 29 aa, Artificial Sequence
  Cyclic GFR-binding peptide
RPVQIRKIVGRKPKVKKATVRIKPHQGQH

SEQ ID NO: 129294 - protein, 29 aa, Artificial Sequence
  Cyclic GFR-binding peptide
RSVKIAKVIGKTPKIKEVQVRIKPHQGQH

SEQ ID NO: 129295 - protein, 29 aa, Artificial Sequence
  Cyclic GFR-binding peptide
RSVKIAKVVGRTPKVKEVQVRIKPHQGQH

SEQ ID NO: 129296 - protein, 31 aa, Artificial Sequence; identical to SEQ ID NO: 128669
  Cyclic GFR-binding peptide

SEQ ID NO: 129297 - protein, 29 aa, Artificial Sequence
  Cyclic GFR-binding peptide
EYVRKKPKLRYKKLIKPTKGIFYLISIAN

SEQ ID NO: 129298 - protein, 31 aa, Artificial Sequence
  Cyclic GFR-binding peptide
EYVRKKPKLRHKRLFIPKKRVIEYYLVSTAS

SEQ ID NO: 129299 - protein, 29 aa, Artificial Sequence
  Cyclic GFR-binding peptide
EYVRKKPKLYHYKLVVKDYEDKYLMSIPS

SEQ ID NO: 129300 - protein, 29 aa, Artificial Sequence
  Cyclic GFR-binding peptide
EYVRKKPKLQYNKLIVNNSSDLYLVSIAS

SEQ ID NO: 129301 - protein, 29 aa, Artificial Sequence
  Cyclic GFR-binding peptide
EYVRKKPKLRYKKLVVKDYEDFYLMSIAN

SEQ ID NO: 129302 - protein, 29 aa, Artificial Sequence
  Cyclic GFR-binding peptide
EYVRKKPKLRYKKLVKPTRGVFYLISIAN

SEQ ID NO: 129303 - protein, 29 aa, Artificial Sequence
  Cyclic GFR-binding peptide
EYVRKKPKLRHKRLVVKENEDYYLMSTAS

SEQ ID NO: 129304 - protein, 29 aa, Artificial Sequence
  Cyclic GFR-binding peptide
EYVRKKPKLYHYKLIKPTKGIKYLISIPS

SEQ ID NO: 129305 - protein, 31 aa, Artificial Sequence
  Cyclic GFR-binding peptide
EYVRKKPKLRYKKLFIPKKRVIEFYLVSIAN

SEQ ID NO: 129306 - protein, 29 aa, Artificial Sequence
  Cyclic GFR-binding peptide
EYVRKKPKLYHYKLVVKENEDKYLMSIPS

SEQ ID NO: 129307 - protein, 29 aa, Artificial Sequence
  Cyclic GFR-binding peptide
EYVRKKPKLRHKRLVKPKRGVYYLISTAS

SEQ ID NO: 129308 - protein, 29 aa, Artificial Sequence
  Cyclic GFR-binding peptide
EYVRKKPKLYHYKLVKPKRGVKYLISIPS

SEQ ID NO: 129309 - protein, 31 aa, Artificial Sequence
  Cyclic GFR-binding peptide
EYVRKKPKLQYNKLFIPKKRVIELYLVSIAS

SEQ ID NO: 129310 - protein, 29 aa, Artificial Sequence
  Cyclic GFR-binding peptide
EYVRKKPKLQYNKLVKPTRGVLYLISIAS

SEQ ID NO: 129311 - protein, 29 aa, Artificial Sequence
  Cyclic GFR-binding peptide
EYVRKKPKLRYKKLVVKENEDFYLMSIAN

SEQ ID NO: 129312 - protein, 29 aa, Artificial Sequence
  Cyclic GFR-binding peptide
EYVRKKPKLQYNKLTPVGMDDLYLVSIAS

SEQ ID NO: 129313 - protein, 29 aa, Artificial Sequence
  Cyclic GFR-binding peptide
EYVRKKPKLRYKKLTPVGMDDFYLVSIAN

SEQ ID NO: 129314 - protein, 29 aa, Artificial Sequence
  Cyclic GFR-binding peptide
EYVRKKPKLRYKKLVKPKRGVFYLISIAN

SEQ ID NO: 129315 - protein, 29 aa, Artificial Sequence
  Cyclic GFR-binding peptide
EYVRKKPKLQYNKLVVKENEDLYLMSIAS

SEQ ID NO: 129316 - protein, 29 aa, Artificial Sequence
  Cyclic GFR-binding peptide
EYVRKKPKLYHYKLIVNSSDDKYLVSIPS

SEQ ID NO: 129317 - protein, 29 aa, Artificial Sequence
  Cyclic GFR-binding peptide
EYVRKKPKLQYNKLVKPKRGVLYLISIAS

SEQ ID NO: 129318 - protein, 29 aa, Artificial Sequence
  Cyclic GFR-binding peptide
EYVRKKPKLRYKKLIVNNSSDFYLVSIAN

SEQ ID NO: 129319 - protein, 29 aa, Artificial Sequence
  Cyclic GFR-binding peptide
EYVRKKPKLRYKKLIVNSSDDFYLVSIAN

SEQ ID NO: 129320 - protein, 29 aa, Artificial Sequence
  Cyclic GFR-binding peptide
EYVRKKPKLRHKRLVKPTRGVYYLISTAS

SEQ ID NO: 129321 - protein, 31 aa, Artificial Sequence
  Cyclic GFR-binding peptide
EYVRKKPKLYHYKLFIPKKRVIEKYLVSIPS

SEQ ID NO: 129322 - protein, 29 aa, Artificial Sequence
  Cyclic GFR-binding peptide
EYVRKKPKLRHKRLIKPTKGIYYLISTAS

SEQ ID NO: 129323 - protein, 29 aa, Artificial Sequence
  Cyclic GFR-binding peptide
EYVRKKPKLRHKRLTPVGMDDYYLVSTAS

SEQ ID NO: 129324 - protein, 29 aa, Artificial Sequence
  Cyclic GFR-binding peptide
EYVRKKPKLYHYKLTPVGMDDKYLVSIPS

SEQ ID NO: 129325 - protein, 29 aa, Artificial Sequence
  Cyclic GFR-binding peptide
EYVRKKPKLYHYKLIVNNSSDKYLVSIPS

SEQ ID NO: 129326 - protein, 29 aa, Artificial Sequence
  Cyclic GFR-binding peptide
EYVRKKPKLRHKRLIVNNSSDYYLVSTAS

SEQ ID NO: 129327 - protein, 29 aa, Artificial Sequence
  Cyclic GFR-binding peptide
EYVRKKPKLYHYKLVKPTRGVKYLISIPS

SEQ ID NO: 129328 - protein, 29 aa, Artificial Sequence
  Cyclic GFR-binding peptide
EYVRKKPKLRHKRLIVNSSDDYYLVSTAS

SEQ ID NO: 129329 - protein, 29 aa, Artificial Sequence
  Cyclic GFR-binding peptide
EYVRKKPKLRHKRLVVKDYEDYYLMSTAS

SEQ ID NO: 129330 - protein, 29 aa, Artificial Sequence
  Cyclic GFR-binding peptide
EYVRKKPKLQYNKLIKPTKGILYLISIAS

SEQ ID NO: 129331 - protein, 29 aa, Artificial Sequence
  Cyclic GFR-binding peptide
EYVRKKPKLQYNKLVVKDYEDLYLMSIAS

SEQ ID NO: 129332 - protein, 29 aa, Artificial Sequence
  Cyclic GFR-binding peptide
EYVRKKPKLQYNKLIVNSSDDLYLVSIAS

SEQ ID NO: 129333 - protein, 29 aa, Artificial Sequence
  Cyclic GFR-binding peptide
NAISILYFIGKTPKILKKYREYVRKKPKL

SEQ ID NO: 129334 - protein, 31 aa, Artificial Sequence
  Cyclic GFR-binding peptide
SATSVLYYEIVRKKPIFLRKHREYVRKKPKL

SEQ ID NO: 129335 - protein, 29 aa, Artificial Sequence
  Cyclic GFR-binding peptide
SPISMLYKDEYDKVVLKYHYEYVRKKPKL

SEQ ID NO: 129336 - protein, 29 aa, Artificial Sequence
  Cyclic GFR-binding peptide
SAISVLYLDSSNNVILKNYQEYVRKKPKL

SEQ ID NO: 129337 - protein, 29 aa, Artificial Sequence
  Cyclic GFR-binding peptide
NAISMLYFDEYDKVVLKKYREYVRKKPKL

SEQ ID NO: 129338 - protein, 29 aa, Artificial Sequence
  Cyclic GFR-binding peptide
NAISILYFVGRTPKVLKKYREYVRKKPKL

SEQ ID NO: 129339 - protein, 29 aa, Artificial Sequence
  Cyclic GFR-binding peptide
SATSMLYYDENEKVVLRKHREYVRKKPKL

SEQ ID NO: 129340 - protein, 29 aa, Artificial Sequence
  Cyclic GFR-binding peptide
SPISILYKIGKTPKILKYHYEYVRKKPKL

SEQ ID NO: 129341 - protein, 31 aa, Artificial Sequence
  Cyclic GFR-binding peptide
NAISVLYFEIVRKKPIFLKKYREYVRKKPKL

SEQ ID NO: 129342 - protein, 29 aa, Artificial Sequence
  Cyclic GFR-binding peptide
SPISMLYKDENEKVVLKYHYEYVRKKPKL

SEQ ID NO: 129343 - protein, 29 aa, Artificial Sequence
  Cyclic GFR-binding peptide
SATSILYYVGRKPKVLRKHREYVRKKPKL

SEQ ID NO: 129344 - protein, 29 aa, Artificial Sequence
  Cyclic GFR-binding peptide
SPISILYKVGRKPKVLKYHYEYVRKKPKL

SEQ ID NO: 129345 - protein, 31 aa, Artificial Sequence
  Cyclic GFR-binding peptide
SAISVLYLEIVRKKPIFLKNYQEYVRKKPKL

SEQ ID NO: 129346 - protein, 29 aa, Artificial Sequence
  Cyclic GFR-binding peptide
SAISILYLVGRTPKVLKNYQEYVRKKPKL

SEQ ID NO: 129347 - protein, 29 aa, Artificial Sequence
  Cyclic GFR-binding peptide
NAISMLYFDENEKVVLKKYREYVRKKPKL

SEQ ID NO: 129348 - protein, 29 aa, Artificial Sequence
  Cyclic GFR-binding peptide
SAISVLYLDDMGVPTLKNYQEYVRKKPKL

SEQ ID NO: 129349 - protein, 29 aa, Artificial Sequence
  Cyclic GFR-binding peptide
NAISVLYFDDMGVPTLKKYREYVRKKPKL

SEQ ID NO: 129350 - protein, 29 aa, Artificial Sequence
  Cyclic GFR-binding peptide
NAISILYFVGRKPKVLKKYREYVRKKPKL

SEQ ID NO: 129351 - protein, 29 aa, Artificial Sequence
  Cyclic GFR-binding peptide
SAISMLYLDENEKVVLKNYQEYVRKKPKL

SEQ ID NO: 129352 - protein, 29 aa, Artificial Sequence
  Cyclic GFR-binding peptide
SPISVLYKDDSSNVILKYHYEYVRKKPKL

SEQ ID NO: 129353 - protein, 29 aa, Artificial Sequence
  Cyclic GFR-binding peptide
SAISILYLVGRKPKVLKNYQEYVRKKPKL

SEQ ID NO: 129354 - protein, 29 aa, Artificial Sequence
  Cyclic GFR-binding peptide
NAISVLYFDSSNNVILKKYREYVRKKPKL

SEQ ID NO: 129355 - protein, 29 aa, Artificial Sequence
  Cyclic GFR-binding peptide
NAISVLYFDDSSNVILKKYREYVRKKPKL

SEQ ID NO: 129356 - protein, 29 aa, Artificial Sequence
  Cyclic GFR-binding peptide
SATSILYYVGRTPKVLRKHREYVRKKPKL

SEQ ID NO: 129357 - protein, 31 aa, Artificial Sequence
  Cyclic GFR-binding peptide
SPISVLYKEIVRKKPIFLKYHYEYVRKKPKL

SEQ ID NO: 129358 - protein, 29 aa, Artificial Sequence
  Cyclic GFR-binding peptide
SATSILYYIGKTPKILRKHREYVRKKPKL

SEQ ID NO: 129359 - protein, 29 aa, Artificial Sequence
  Cyclic GFR-binding peptide
SATSVLYYDDMGVPTLRKHREYVRKKPKL

SEQ ID NO: 129360 - protein, 29 aa, Artificial Sequence
  Cyclic GFR-binding peptide
SPISVLYKDDMGVPTLKYHYEYVRKKPKL

SEQ ID NO: 129361 - protein, 29 aa, Artificial Sequence
  Cyclic GFR-binding peptide
SPISVLYKDSSNNVILKYHYEYVRKKPKL

SEQ ID NO: 129362 - protein, 29 aa, Artificial Sequence
  Cyclic GFR-binding peptide
SATSVLYYDSSNNVILRKHREYVRKKPKL

SEQ ID NO: 129363 - protein, 29 aa, Artificial Sequence
  Cyclic GFR-binding peptide
SPISILYKVGRTPKVLKYHYEYVRKKPKL

SEQ ID NO: 129364 - protein, 29 aa, Artificial Sequence
  Cyclic GFR-binding peptide
SATSVLYYDDSSNVILRKHREYVRKKPKL

SEQ ID NO: 129365 - protein, 29 aa, Artificial Sequence
  Cyclic GFR-binding peptide
SATSMLYYDEYDKVVLRKHREYVRKKPKL

SEQ ID NO: 129366 - protein, 29 aa, Artificial Sequence
  Cyclic GFR-binding peptide
SAISILYLIGKTPKILKNYQEYVRKKPKL

SEQ ID NO: 129367 - protein, 29 aa, Artificial Sequence
  Cyclic GFR-binding peptide
SAISMLYLDEYDKVVLKNYQEYVRKKPKL

SEQ ID NO: 129368 - protein, 29 aa, Artificial Sequence
  Cyclic GFR-binding peptide
SAISVLYLDDSSNVILKNYQEYVRKKPKL

SEQ ID NO: 129369 - protein, 29 aa, Artificial Sequence
  Cyclic GFR-binding peptide
EYVRKKPKLRYKKLIKPTKGIFYLISIAN

SEQ ID NO: 129370 - protein, 29 aa, Artificial Sequence
  Cyclic GFR-binding peptide
EYVRKKPKLNSLQEVVKDYEDYYLMTLPE

SEQ ID NO: 129371 - protein, 29 aa, Artificial Sequence
  Cyclic GFR-binding peptide
EYVRKKPKLNSLQEIKPTKGIYYVIPLPE

SEQ ID NO: 129372 - protein, 29 aa, Artificial Sequence
  Cyclic GFR-binding peptide
EYVRKKPKLNSLQEVKPKRGVYYLITLPE

SEQ ID NO: 129373 - protein, 29 aa, Artificial Sequence
  Cyclic GFR-binding peptide
EYVRKKPKLNSLQEVKPTRGVYYVIPLPE

SEQ ID NO: 129374 - protein, 29 aa, Artificial Sequence
  Cyclic GFR-binding peptide
EYVRKKPKLRYKKLVVKDYEDFYLMSIAN

SEQ ID NO: 129375 - protein, 29 aa, Artificial Sequence
  Cyclic GFR-binding peptide
EYVRKKPKLEYQKYIVNSSDDIFLVSIPS

SEQ ID NO: 129376 - protein, 29 aa, Artificial Sequence
  Cyclic GFR-binding peptide
EYVRKKPKLEYQKYVKPTRGVIFLISIPS

SEQ ID NO: 129377 - protein, 29 aa, Artificial Sequence
  Cyclic GFR-binding peptide
EYVRKKPKLNSLQEVVKENEDYYLMTLPE

SEQ ID NO: 129378 - protein, 29 aa, Artificial Sequence
  Cyclic GFR-binding peptide
EYVRKKPKLRYKKLVKPTRGVFYLISIAN

SEQ ID NO: 129379 - protein, 29 aa, Artificial Sequence
  Cyclic GFR-binding peptide
EYVRKKPKLNSLQEVVNNASDYYLITLPE

SEQ ID NO: 129380 - protein, 29 aa, Artificial Sequence
  Cyclic GFR-binding peptide
EYVRKKPKLNSLQEVKPKRGVYYVIPLPE

SEQ ID NO: 129381 - protein, 29 aa, Artificial Sequence
  Cyclic GFR-binding peptide
EYVRKKPKLNSLQEVVNNASDYYVIPLPE

SEQ ID NO: 129382 - protein, 29 aa, Artificial Sequence
  Cyclic GFR-binding peptide
EYVRKKPKLNSLQEVKPTRGVYYLITLPE

SEQ ID NO: 129383 - protein, 29 aa, Artificial Sequence
  Cyclic GFR-binding peptide
EYVRKKPKLQYNKLVKPTRGVLYLISIAS

SEQ ID NO: 129384 - protein, 29 aa, Artificial Sequence
  Cyclic GFR-binding peptide
EYVRKKPKLRYKKLVVKENEDFYLMSIAN

SEQ ID NO: 129385 - protein, 29 aa, Artificial Sequence
  Cyclic GFR-binding peptide
EYVRKKPKLEYQKYIKPTKGIIFLISIPS

SEQ ID NO: 129386 - protein, 29 aa, Artificial Sequence
  Cyclic GFR-binding peptide
EYVRKKPKLEYQKYVVNNASDIFLISIPS

SEQ ID NO: 129387 - protein, 29 aa, Artificial Sequence
  Cyclic GFR-binding peptide
EYVRKKPKLRYKKLVKPKRGVFYLISIAN

SEQ ID NO: 129388 - protein, 29 aa, Artificial Sequence
  Cyclic GFR-binding peptide
EYVRKKPKLNSLQEIVNSSDDYYVVPLPE

SEQ ID NO: 129389 - protein, 29 aa, Artificial Sequence
  Cyclic GFR-binding peptide
EYVRKKPKLNSLQEVVKDYEDYYVMPLPE

SEQ ID NO: 129390 - protein, 29 aa, Artificial Sequence
  Cyclic GFR-binding peptide
EYVRKKPKLQYNKLVVKENEDLYLMSIAS

SEQ ID NO: 129391 - protein, 29 aa, Artificial Sequence
  Cyclic GFR-binding peptide
EYVRKKPKLEYQKYVVKENEDIFLMSIPS

SEQ ID NO: 129392 - protein, 29 aa, Artificial Sequence
  Cyclic GFR-binding peptide
EYVRKKPKLQYNKLVKPKRGVLYLISIAS

SEQ ID NO: 129393 - protein, 29 aa, Artificial Sequence
  Cyclic GFR-binding peptide
EYVRKKPKLRYKKLIVNSSDDFYLVSIAN

SEQ ID NO: 129394 - protein, 29 aa, Artificial Sequence
  Cyclic GFR-binding peptide
EYVRKKPKLNSLQEVVKENEDYYVMPLPE

SEQ ID NO: 129395 - protein, 29 aa, Artificial Sequence
  Cyclic GFR-binding peptide
EYVRKKPKLEYQKYVVKDYEDIFLMSIPS

SEQ ID NO: 129396 - protein, 29 aa, Artificial Sequence
  Cyclic GFR-binding peptide
EYVRKKPKLQYNKLVVNNASDLYLISIAS

SEQ ID NO: 129397 - protein, 29 aa, Artificial Sequence
  Cyclic GFR-binding peptide
EYVRKKPKLQYNKLIKPTKGILYLISIAS

SEQ ID NO: 129398 - protein, 29 aa, Artificial Sequence
  Cyclic GFR-binding peptide
EYVRKKPKLNSLQEIKPTKGIYYLITLPE

SEQ ID NO: 129399 - protein, 29 aa, Artificial Sequence
  Cyclic GFR-binding peptide
EYVRKKPKLEYQKYVKPKRGVIFLISIPS

SEQ ID NO: 129400 - protein, 29 aa, Artificial Sequence
  Cyclic GFR-binding peptide
EYVRKKPKLQYNKLVVKDYEDLYLMSIAS

SEQ ID NO: 129401 - protein, 29 aa, Artificial Sequence
  Cyclic GFR-binding peptide
EYVRKKPKLRYKKLVVNNASDFYLISIAN

SEQ ID NO: 129402 - protein, 29 aa, Artificial Sequence
  Cyclic GFR-binding peptide
EYVRKKPKLNSLQEIVNSSDDYYLVTLPE

SEQ ID NO: 129403 - protein, 29 aa, Artificial Sequence
  Cyclic GFR-binding peptide
EYVRKKPKLQYNKLIVNSSDDLYLVSIAS

SEQ ID NO: 129404 - protein, 29 aa, Artificial Sequence
  Cyclic GFR-binding peptide
NAISILYFIGKTPKILKKYREYVRKKPKL

SEQ ID NO: 129405 - protein, 29 aa, Artificial Sequence
  Cyclic GFR-binding peptide
EPLTMLYYDEYDKVVEQLSNEYVRKKPKL

SEQ ID NO: 129406 - protein, 29 aa, Artificial Sequence
  Cyclic GFR-binding peptide
EPLPIVYYIGKTPKIEQLSNEYVRKKPKL

SEQ ID NO: 129407 - protein, 29 aa, Artificial Sequence
  Cyclic GFR-binding peptide
EPLTILYYVGRKPKVEQLSNEYVRKKPKL

SEQ ID NO: 129408 - protein, 29 aa, Artificial Sequence
  Cyclic GFR-binding peptide
EPLPIVYYVGRTPKVEQLSNEYVRKKPKL

SEQ ID NO: 129409 - protein, 29 aa, Artificial Sequence
  Cyclic GFR-binding peptide
NAISMLYFDEYDKVVLKKYREYVRKKPKL

SEQ ID NO: 129410 - protein, 29 aa, Artificial Sequence
  Cyclic GFR-binding peptide
SPISVLFIDDSSNVIYKQYEEYVRKKPKL

SEQ ID NO: 129411 - protein, 29 aa, Artificial Sequence
  Cyclic GFR-binding peptide
SPISILFIVGRTPKVYKQYEEYVRKKPKL

SEQ ID NO: 129412 - protein, 29 aa, Artificial Sequence
  Cyclic GFR-binding peptide
EPLTMLYYDENEKVVEQLSNEYVRKKPKL

SEQ ID NO: 129413 - protein, 29 aa, Artificial Sequence
  Cyclic GFR-binding peptide
NAISILYFVGRTPKVLKKYREYVRKKPKL

SEQ ID NO: 129414 - protein, 29 aa, Artificial Sequence
  Cyclic GFR-binding peptide
EPLTILYYDSANNVVEQLSNEYVRKKPKL

SEQ ID NO: 129415 - protein, 29 aa, Artificial Sequence
  Cyclic GFR-binding peptide
EPLPIVYYVGRKPKVEQLSNEYVRKKPKL

SEQ ID NO: 129416 - protein, 29 aa, Artificial Sequence
  Cyclic GFR-binding peptide
EPLPIVYYDSANNVVEQLSNEYVRKKPKL

SEQ ID NO: 129417 - protein, 29 aa, Artificial Sequence
  Cyclic GFR-binding peptide
EPLTILYYVGRTPKVEQLSNEYVRKKPKL

SEQ ID NO: 129418 - protein, 29 aa, Artificial Sequence
  Cyclic GFR-binding peptide
SAISILYLVGRTPKVLKNYQEYVRKKPKL

SEQ ID NO: 129419 - protein, 29 aa, Artificial Sequence
  Cyclic GFR-binding peptide
NAISMLYFDENEKVVLKKYREYVRKKPKL

SEQ ID NO: 129420 - protein, 29 aa, Artificial Sequence
  Cyclic GFR-binding peptide
SPISILFIIGKTPKIYKQYEEYVRKKPKL

SEQ ID NO: 129421 - protein, 29 aa, Artificial Sequence
  Cyclic GFR-binding peptide
SPISILFIDSANNVVYKQYEEYVRKKPKL

SEQ ID NO: 129422 - protein, 29 aa, Artificial Sequence
  Cyclic GFR-binding peptide
NAISILYFVGRKPKVLKKYREYVRKKPKL

SEQ ID NO: 129423 - protein, 29 aa, Artificial Sequence
  Cyclic GFR-binding peptide
EPLPVVYYDDSSNVIEQLSNEYVRKKPKL

SEQ ID NO: 129424 - protein, 29 aa, Artificial Sequence
  Cyclic GFR-binding peptide
EPLPMVYYDEYDKVVEQLSNEYVRKKPKL

SEQ ID NO: 129425 - protein, 29 aa, Artificial Sequence
  Cyclic GFR-binding peptide
SAISMLYLDENEKVVLKNYQEYVRKKPKL

SEQ ID NO: 129426 - protein, 29 aa, Artificial Sequence
  Cyclic GFR-binding peptide
SPISMLFIDENEKVVYKQYEEYVRKKPKL

SEQ ID NO: 129427 - protein, 29 aa, Artificial Sequence
  Cyclic GFR-binding peptide
SAISILYLVGRKPKVLKNYQEYVRKKPKL

SEQ ID NO: 129428 - protein, 29 aa, Artificial Sequence
  Cyclic GFR-binding peptide
NAISVLYFDDSSNVILKKYREYVRKKPKL

SEQ ID NO: 129429 - protein, 29 aa, Artificial Sequence
  Cyclic GFR-binding peptide
EPLPMVYYDENEKVVEQLSNEYVRKKPKL

SEQ ID NO: 129430 - protein, 29 aa, Artificial Sequence
  Cyclic GFR-binding peptide
SPISMLFIDEYDKVVYKQYEEYVRKKPKL

SEQ ID NO: 129431 - protein, 29 aa, Artificial Sequence
  Cyclic GFR-binding peptide
SAISILYLDSANNVVLKNYQEYVRKKPKL

SEQ ID NO: 129432 - protein, 29 aa, Artificial Sequence
  Cyclic GFR-binding peptide
SAISILYLIGKTPKILKNYQEYVRKKPKL

SEQ ID NO: 129433 - protein, 29 aa, Artificial Sequence
  Cyclic GFR-binding peptide
EPLTILYYIGKTPKIEQLSNEYVRKKPKL

SEQ ID NO: 129434 - protein, 29 aa, Artificial Sequence
  Cyclic GFR-binding peptide
SPISILFIVGRKPKVYKQYEEYVRKKPKL

SEQ ID NO: 129435 - protein, 29 aa, Artificial Sequence
  Cyclic GFR-binding peptide
SAISMLYLDEYDKVVLKNYQEYVRKKPKL

SEQ ID NO: 129436 - protein, 29 aa, Artificial Sequence
  Cyclic GFR-binding peptide
NAISILYFDSANNVVLKKYREYVRKKPKL

SEQ ID NO: 129437 - protein, 29 aa, Artificial Sequence
  Cyclic GFR-binding peptide
EPLTVLYYDDSSNVIEQLSNEYVRKKPKL

SEQ ID NO: 129438 - protein, 29 aa, Artificial Sequence
  Cyclic GFR-binding peptide
SAISVLYLDDSSNVILKNYQEYVRKKPKL

SEQ ID NO: 129439 - protein, 31 aa, Artificial Sequence
  Cyclic GFR-binding peptide
EYVRKKPKLVTAKKLKPKKRVYEIKRVQVPR

SEQ ID NO: 129440 - protein, 31 aa, Artificial Sequence
  Cyclic GFR-binding peptide
EYVRKKPKLVQVEKLKPKKRVYEVKAVKVSR

SEQ ID NO: 129441 - protein, 31 aa, Artificial Sequence
  Cyclic GFR-binding peptide
EYVRKKPKLVQVEKFIPKKRVIEVKAVKVSR

SEQ ID NO: 129442 - protein, 31 aa, Artificial Sequence
  Cyclic GFR-binding peptide
EYVRKKPKLVQVEKHQGQHPKIRVKAMKVSR

SEQ ID NO: 129443 - protein, 31 aa, Artificial Sequence
  Cyclic GFR-binding peptide
EYVRKKPKLVTAKKHQGQHPKIRIKRMQVPR

SEQ ID NO: 129444 - protein, 31 aa, Artificial Sequence
  Cyclic GFR-binding peptide
EYVRKKPKLSMEGLLKPKKRVYEMIQVTINS

SEQ ID NO: 129445 - protein, 31 aa, Artificial Sequence
  Cyclic GFR-binding peptide
EYVRKKPKLSMEGIFIPKKRVIEMIQVTINS

SEQ ID NO: 129446 - protein, 31 aa, Artificial Sequence
  Cyclic GFR-binding peptide
EYVRKKPKLSMEGLHQGQHPKIRMIQMTINS

SEQ ID NO: 129447 - protein, 31 aa, Artificial Sequence
  Cyclic GFR-binding peptide
EYVRKKPKLSMEGILKPKKRVYEMIQVTINS

SEQ ID NO: 129448 - protein, 31 aa, Artificial Sequence
  Cyclic GFR-binding peptide
EYVRKKPKLSMEGLFIPKKRVIEMIQVTINS

SEQ ID NO: 129449 - protein, 31 aa, Artificial Sequence
  Cyclic GFR-binding peptide
EYVRKKPKLVTAKKFIPKKRVIEIKRVQVPR

SEQ ID NO: 129450 - protein, 31 aa, Artificial Sequence
  Cyclic GFR-binding peptide
EYVRKKPKLSMEGIHQGQHPKIRMIQMTINS

SEQ ID NO: 129451 - protein, 31 aa, Artificial Sequence
  Cyclic GFR-binding peptide
RPVQVRKIEYVRKKPKLKKATVEYVRKKPKL

SEQ ID NO: 129452 - protein, 31 aa, Artificial Sequence
  Cyclic GFR-binding peptide
RSVKVAKVEYVRKKPKLKEVQVEYVRKKPKL

SEQ ID NO: 129453 - protein, 31 aa, Artificial Sequence
  Cyclic GFR-binding peptide
RSVKVAKVEIVRKKPIFKEVQVEYVRKKPKL

SEQ ID NO: 129454 - protein, 31 aa, Artificial Sequence
  Cyclic GFR-binding peptide
RSVKMAKVRIKPHQGQHKEVQVEYVRKKPKL

SEQ ID NO: 129455 - protein, 31 aa, Artificial Sequence
  Cyclic GFR-binding peptide
RPVQMRKIRIKPHQGQHKKATVEYVRKKPKL

SEQ ID NO: 129456 - protein, 31 aa, Artificial Sequence
  Cyclic GFR-binding peptide
SNITVQIMEYVRKKPKLLGEMSEYVRKKPKL

SEQ ID NO: 129457 - protein, 31 aa, Artificial Sequence
  Cyclic GFR-binding peptide
SNITVQIMEIVRKKPIFIGEMSEYVRKKPKL

SEQ ID NO: 129458 - protein, 31 aa, Artificial Sequence
  Cyclic GFR-binding peptide
SNITMQIMRIKPHQGQHLGEMSEYVRKKPKL

SEQ ID NO: 129459 - protein, 31 aa, Artificial Sequence
  Cyclic GFR-binding peptide
SNITVQIMEYVRKKPKLIGEMSEYVRKKPKL

SEQ ID NO: 129460 - protein, 31 aa, Artificial Sequence
  Cyclic GFR-binding peptide
SNITVQIMEIVRKKPIFLGEMSEYVRKKPKL

SEQ ID NO: 129461 - protein, 31 aa, Artificial Sequence
  Cyclic GFR-binding peptide
RPVQVRKIEIVRKKPIFKKATVEYVRKKPKL

SEQ ID NO: 129462 - protein, 31 aa, Artificial Sequence
  Cyclic GFR-binding peptide
SNITMQIMRIKPHQGQHIGEMSEYVRKKPKL

SEQ ID NO: 129463 - protein, 31 aa, Artificial Sequence; identical to SEQ ID NO: 129439
  Cyclic GFR-binding peptide

SEQ ID NO: 129464 - protein, 31 aa, Artificial Sequence; identical to SEQ ID NO: 129440
  Cyclic GFR-binding peptide

SEQ ID NO: 129465 - protein, 31 aa, Artificial Sequence; identical to SEQ ID NO: 129441
  Cyclic GFR-binding peptide

SEQ ID NO: 129466 - protein, 31 aa, Artificial Sequence; identical to SEQ ID NO: 129442
  Cyclic GFR-binding peptide

SEQ ID NO: 129467 - protein, 31 aa, Artificial Sequence; identical to SEQ ID NO: 129443
  Cyclic GFR-binding peptide

SEQ ID NO: 129468 - protein, 31 aa, Artificial Sequence; identical to SEQ ID NO: 129444
  Cyclic GFR-binding peptide

SEQ ID NO: 129469 - protein, 31 aa, Artificial Sequence; identical to SEQ ID NO: 129445
  Cyclic GFR-binding peptide

SEQ ID NO: 129470 - protein, 31 aa, Artificial Sequence; identical to SEQ ID NO: 129446
  Cyclic GFR-binding peptide

SEQ ID NO: 129471 - protein, 31 aa, Artificial Sequence; identical to SEQ ID NO: 129447
  Cyclic GFR-binding peptide

SEQ ID NO: 129472 - protein, 31 aa, Artificial Sequence; identical to SEQ ID NO: 129448
  Cyclic GFR-binding peptide

SEQ ID NO: 129473 - protein, 31 aa, Artificial Sequence; identical to SEQ ID NO: 129449
  Cyclic GFR-binding peptide

SEQ ID NO: 129474 - protein, 31 aa, Artificial Sequence; identical to SEQ ID NO: 129450
  Cyclic GFR-binding peptide

SEQ ID NO: 129475 - protein, 31 aa, Artificial Sequence; identical to SEQ ID NO: 129451
  Cyclic GFR-binding peptide

SEQ ID NO: 129476 - protein, 31 aa, Artificial Sequence; identical to SEQ ID NO: 129452
  Cyclic GFR-binding peptide

SEQ ID NO: 129477 - protein, 31 aa, Artificial Sequence; identical to SEQ ID NO: 129453
  Cyclic GFR-binding peptide

SEQ ID NO: 129478 - protein, 31 aa, Artificial Sequence; identical to SEQ ID NO: 129454
  Cyclic GFR-binding peptide

SEQ ID NO: 129479 - protein, 31 aa, Artificial Sequence; identical to SEQ ID NO: 129455
  Cyclic GFR-binding peptide

SEQ ID NO: 129480 - protein, 31 aa, Artificial Sequence; identical to SEQ ID NO: 129456
  Cyclic GFR-binding peptide

SEQ ID NO: 129481 - protein, 31 aa, Artificial Sequence; identical to SEQ ID NO: 129457
  Cyclic GFR-binding peptide

SEQ ID NO: 129482 - protein, 31 aa, Artificial Sequence; identical to SEQ ID NO: 129458
  Cyclic GFR-binding peptide

SEQ ID NO: 129483 - protein, 31 aa, Artificial Sequence; identical to SEQ ID NO: 129459
  Cyclic GFR-binding peptide

SEQ ID NO: 129484 - protein, 31 aa, Artificial Sequence; identical to SEQ ID NO: 129460
  Cyclic GFR-binding peptide

SEQ ID NO: 129485 - protein, 31 aa, Artificial Sequence; identical to SEQ ID NO: 129461
  Cyclic GFR-binding peptide

SEQ ID NO: 129486 - protein, 31 aa, Artificial Sequence; identical to SEQ ID NO: 129462
  Cyclic GFR-binding peptide

SEQ ID NO: 129487 - protein, 29 aa, Artificial Sequence
  Cyclic GFR-binding peptide
EYVRKKPKLEYQKYVVKENEDIYLMSIPS

SEQ ID NO: 129488 - protein, 29 aa, Artificial Sequence
  Cyclic GFR-binding peptide
EYVRKKPKLRYKKLIKPTKGIFYLISIAN

SEQ ID NO: 129489 - protein, 29 aa, Artificial Sequence
  Cyclic GFR-binding peptide
EYVRKKPKLEYKFKVKPTRGVLYLISIPE

SEQ ID NO: 129490 - protein, 29 aa, Artificial Sequence
  Cyclic GFR-binding peptide
EYVRKKPKLYHYKLVVKDYEDKYLMSIPS

SEQ ID NO: 129491 - protein, 29 aa, Artificial Sequence
  Cyclic GFR-binding peptide
EYVRKKPKLEYKFKTPVGMDDLYLVSIPE

SEQ ID NO: 129492 - protein, 29 aa, Artificial Sequence
  Cyclic GFR-binding peptide
EYVRKKPKLEYQKYVKPKRGVIYLISIPS

SEQ ID NO: 129493 - protein, 29 aa, Artificial Sequence
  Cyclic GFR-binding peptide
EYVRKKPKLRYKKLVVKDYEDFYLMSIAN

SEQ ID NO: 129494 - protein, 29 aa, Artificial Sequence
  Cyclic GFR-binding peptide
EYVRKKPKLEYQKYVVKDYEDIYLMSIPS

SEQ ID NO: 129495 - protein, 29 aa, Artificial Sequence
  Cyclic GFR-binding peptide
EYVRKKPKLRYKKLVKPTRGVFYLISIAN

SEQ ID NO: 129496 - protein, 29 aa, Artificial Sequence
  Cyclic GFR-binding peptide
EYVRKKPKLYHYKLIKPTKGIKYLISIPS

SEQ ID NO: 129497 - protein, 29 aa, Artificial Sequence
  Cyclic GFR-binding peptide
EYVRKKPKLYHYKLVVKENEDKYLMSIPS

SEQ ID NO: 129498 - protein, 29 aa, Artificial Sequence
  Cyclic GFR-binding peptide
EYVRKKPKLYHYKLVKPKRGVKYLISIPS

SEQ ID NO: 129499 - protein, 29 aa, Artificial Sequence
  Cyclic GFR-binding peptide
EYVRKKPKLEYKFKIKPTKGILYLISIPE

SEQ ID NO: 129500 - protein, 29 aa, Artificial Sequence
  Cyclic GFR-binding peptide
EYVRKKPKLEYQKYIKPTKGIIYLISIPS

SEQ ID NO: 129501 - protein, 29 aa, Artificial Sequence
  Cyclic GFR-binding peptide
EYVRKKPKLRYKKLVVKENEDFYLMSIAN

SEQ ID NO: 129502 - protein, 29 aa, Artificial Sequence
  Cyclic GFR-binding peptide
EYVRKKPKLRYKKLVVNNAADFYLISIAN

SEQ ID NO: 129503 - protein, 29 aa, Artificial Sequence
  Cyclic GFR-binding peptide
EYVRKKPKLYHYKLYTVVGKDKYLISIPS

SEQ ID NO: 129504 - protein, 29 aa, Artificial Sequence
  Cyclic GFR-binding peptide
EYVRKKPKLRYKKLTPVGMDDFYLVSIAN

SEQ ID NO: 129505 - protein, 29 aa, Artificial Sequence
  Cyclic GFR-binding peptide
EYVRKKPKLRYKKLVKPKRGVFYLISIAN

SEQ ID NO: 129506 - protein, 29 aa, Artificial Sequence
  Cyclic GFR-binding peptide
EYVRKKPKLYHYKLVVNNAADKYLISIPS

SEQ ID NO: 129507 - protein, 29 aa, Artificial Sequence
  Cyclic GFR-binding peptide
EYVRKKPKLYHYKLIVNSSDDKYLVSIPS

SEQ ID NO: 129508 - protein, 29 aa, Artificial Sequence
  Cyclic GFR-binding peptide
EYVRKKPKLRYKKLIVNNSSDFYLVSIAN

SEQ ID NO: 129509 - protein, 29 aa, Artificial Sequence
  Cyclic GFR-binding peptide
EYVRKKPKLRYKKLYTVVGKDFYLISIAN

SEQ ID NO: 129510 - protein, 29 aa, Artificial Sequence
  Cyclic GFR-binding peptide
EYVRKKPKLEYQKYVVNNAADIYLISIPS

SEQ ID NO: 129511 - protein, 29 aa, Artificial Sequence
  Cyclic GFR-binding peptide
EYVRKKPKLRYKKLIVNSSDDFYLVSIAN

SEQ ID NO: 129512 - protein, 29 aa, Artificial Sequence
  Cyclic GFR-binding peptide
EYVRKKPKLEYKFKIVNNSSDLYLVSIPE

SEQ ID NO: 129513 - protein, 29 aa, Artificial Sequence
  Cyclic GFR-binding peptide
EYVRKKPKLEYQKYVKPTRGVIYLISIPS

SEQ ID NO: 129514 - protein, 29 aa, Artificial Sequence
  Cyclic GFR-binding peptide
EYVRKKPKLEYQKYIVNSSDDIYLVSIPS

SEQ ID NO: 129515 - protein, 29 aa, Artificial Sequence
  Cyclic GFR-binding peptide
EYVRKKPKLYHYKLTPVGMDDKYLVSIPS

SEQ ID NO: 129516 - protein, 29 aa, Artificial Sequence
  Cyclic GFR-binding peptide
EYVRKKPKLYHYKLIVNNSSDKYLVSIPS

SEQ ID NO: 129517 - protein, 29 aa, Artificial Sequence
  Cyclic GFR-binding peptide
EYVRKKPKLEYKFKIVNSSDDLYLVSIPE

SEQ ID NO: 129518 - protein, 29 aa, Artificial Sequence
  Cyclic GFR-binding peptide
EYVRKKPKLYHYKLVKPTRGVKYLISIPS

SEQ ID NO: 129519 - protein, 29 aa, Artificial Sequence
  Cyclic GFR-binding peptide
EYVRKKPKLEYKFKVKPKRGVLYLISIPE

SEQ ID NO: 129520 - protein, 29 aa, Artificial Sequence
  Cyclic GFR-binding peptide
EYVRKKPKLEYQKYYTVVGKDIYLISIPS

SEQ ID NO: 129521 - protein, 29 aa, Artificial Sequence
  Cyclic GFR-binding peptide
EYVRKKPKLEYKFKVVKENEDLYLMSIPE

SEQ ID NO: 129522 - protein, 29 aa, Artificial Sequence
  Cyclic GFR-binding peptide
EYVRKKPKLEYQKYTPVGMDDIYLVSIPS

SEQ ID NO: 129523 - protein, 29 aa, Artificial Sequence
  Cyclic GFR-binding peptide
EYVRKKPKLEYQKYIVNNSSDIYLVSIPS

SEQ ID NO: 129524 - protein, 29 aa, Artificial Sequence
  Cyclic GFR-binding peptide
EYVRKKPKLEYKFKVVKDYEDLYLMSIPE

SEQ ID NO: 129525 - protein, 29 aa, Artificial Sequence
  Cyclic GFR-binding peptide
EYVRKKPKLEYKFKYTVVGKDLYLISIPE

SEQ ID NO: 129526 - protein, 29 aa, Artificial Sequence
  Cyclic GFR-binding peptide
EYVRKKPKLEYKFKVVNNAADLYLISIPE

SEQ ID NO: 129527 - protein, 29 aa, Artificial Sequence
  Cyclic GFR-binding peptide
SPISMLYIDENEKVVYKQYEEYVRKKPKL

SEQ ID NO: 129528 - protein, 29 aa, Artificial Sequence
  Cyclic GFR-binding peptide
NAISILYFIGKTPKILKKYREYVRKKPKL

SEQ ID NO: 129529 - protein, 29 aa, Artificial Sequence
  Cyclic GFR-binding peptide
EPISILYLVGRTPKVKFKYEEYVRKKPKL

SEQ ID NO: 129530 - protein, 29 aa, Artificial Sequence
  Cyclic GFR-binding peptide
SPISMLYKDEYDKVVLKYHYEYVRKKPKL

SEQ ID NO: 129531 - protein, 29 aa, Artificial Sequence
  Cyclic GFR-binding peptide
EPISVLYLDDMGVPTKFKYEEYVRKKPKL

SEQ ID NO: 129532 - protein, 29 aa, Artificial Sequence
  Cyclic GFR-binding peptide
SPISILYIVGRKPKVYKQYEEYVRKKPKL

SEQ ID NO: 129533 - protein, 29 aa, Artificial Sequence
  Cyclic GFR-binding peptide
NAISMLYFDEYDKVVLKKYREYVRKKPKL

SEQ ID NO: 129534 - protein, 29 aa, Artificial Sequence
  Cyclic GFR-binding peptide
SPISMLYIDEYDKVVYKQYEEYVRKKPKL

SEQ ID NO: 129535 - protein, 29 aa, Artificial Sequence
  Cyclic GFR-binding peptide
NAISILYFVGRTPKVLKKYREYVRKKPKL

SEQ ID NO: 129536 - protein, 29 aa, Artificial Sequence
  Cyclic GFR-binding peptide
SPISILYKIGKTPKILKYHYEYVRKKPKL

SEQ ID NO: 129537 - protein, 29 aa, Artificial Sequence
  Cyclic GFR-binding peptide
SPISMLYKDENEKVVLKYHYEYVRKKPKL

SEQ ID NO: 129538 - protein, 29 aa, Artificial Sequence
  Cyclic GFR-binding peptide
SPISILYKVGRKPKVLKYHYEYVRKKPKL

SEQ ID NO: 129539 - protein, 29 aa, Artificial Sequence
  Cyclic GFR-binding peptide
EPISILYLIGKTPKIKFKYEEYVRKKPKL

SEQ ID NO: 129540 - protein, 29 aa, Artificial Sequence
  Cyclic GFR-binding peptide
SPISILYIIGKTPKIYKQYEEYVRKKPKL

SEQ ID NO: 129541 - protein, 29 aa, Artificial Sequence
  Cyclic GFR-binding peptide
NAISMLYFDENEKVVLKKYREYVRKKPKL

SEQ ID NO: 129542 - protein, 29 aa, Artificial Sequence
  Cyclic GFR-binding peptide
NAISILYFDAANNVVLKKYREYVRKKPKL

SEQ ID NO: 129543 - protein, 29 aa, Artificial Sequence
  Cyclic GFR-binding peptide
SPISILYKDKGVVTYLKYHYEYVRKKPKL

SEQ ID NO: 129544 - protein, 29 aa, Artificial Sequence
  Cyclic GFR-binding peptide
NAISVLYFDDMGVPTLKKYREYVRKKPKL

SEQ ID NO: 129545 - protein, 29 aa, Artificial Sequence
  Cyclic GFR-binding peptide
NAISILYFVGRKPKVLKKYREYVRKKPKL

SEQ ID NO: 129546 - protein, 29 aa, Artificial Sequence
  Cyclic GFR-binding peptide
SPISILYKDAANNVVLKYHYEYVRKKPKL

SEQ ID NO: 129547 - protein, 29 aa, Artificial Sequence
  Cyclic GFR-binding peptide
SPISVLYKDDSSNVILKYHYEYVRKKPKL

SEQ ID NO: 129548 - protein, 29 aa, Artificial Sequence
  Cyclic GFR-binding peptide
NAISVLYFDSSNNVILKKYREYVRKKPKL

SEQ ID NO: 129549 - protein, 29 aa, Artificial Sequence
  Cyclic GFR-binding peptide
NAISILYFDKGVVTYLKKYREYVRKKPKL

SEQ ID NO: 129550 - protein, 29 aa, Artificial Sequence
  Cyclic GFR-binding peptide
SPISILYIDAANNVVYKQYEEYVRKKPKL

SEQ ID NO: 129551 - protein, 29 aa, Artificial Sequence
  Cyclic GFR-binding peptide
NAISVLYFDDSSNVILKKYREYVRKKPKL

SEQ ID NO: 129552 - protein, 29 aa, Artificial Sequence
  Cyclic GFR-binding peptide
EPISVLYLDSSNNVIKFKYEEYVRKKPKL

SEQ ID NO: 129553 - protein, 29 aa, Artificial Sequence
  Cyclic GFR-binding peptide
SPISILYIVGRTPKVYKQYEEYVRKKPKL

SEQ ID NO: 129554 - protein, 29 aa, Artificial Sequence
  Cyclic GFR-binding peptide
SPISVLYIDDSSNVIYKQYEEYVRKKPKL

SEQ ID NO: 129555 - protein, 29 aa, Artificial Sequence
  Cyclic GFR-binding peptide
SPISVLYKDDMGVPTLKYHYEYVRKKPKL

SEQ ID NO: 129556 - protein, 29 aa, Artificial Sequence
  Cyclic GFR-binding peptide
SPISVLYKDSSNNVILKYHYEYVRKKPKL

SEQ ID NO: 129557 - protein, 29 aa, Artificial Sequence
  Cyclic GFR-binding peptide
EPISVLYLDDSSNVIKFKYEEYVRKKPKL

SEQ ID NO: 129558 - protein, 29 aa, Artificial Sequence
  Cyclic GFR-binding peptide
SPISILYKVGRTPKVLKYHYEYVRKKPKL

SEQ ID NO: 129559 - protein, 29 aa, Artificial Sequence
  Cyclic GFR-binding peptide
EPISILYLVGRKPKVKFKYEEYVRKKPKL

SEQ ID NO: 129560 - protein, 29 aa, Artificial Sequence
  Cyclic GFR-binding peptide
SPISILYIDKGVVTYYKQYEEYVRKKPKL

SEQ ID NO: 129561 - protein, 29 aa, Artificial Sequence
  Cyclic GFR-binding peptide
EPISMLYLDENEKVVKFKYEEYVRKKPKL

SEQ ID NO: 129562 - protein, 29 aa, Artificial Sequence
  Cyclic GFR-binding peptide
SPISVLYIDDMGVPTYKQYEEYVRKKPKL

SEQ ID NO: 129563 - protein, 29 aa, Artificial Sequence
  Cyclic GFR-binding peptide
SPISVLYIDSSNNVIYKQYEEYVRKKPKL

SEQ ID NO: 129564 - protein, 29 aa, Artificial Sequence
  Cyclic GFR-binding peptide
EPISMLYLDEYDKVVKFKYEEYVRKKPKL

SEQ ID NO: 129565 - protein, 29 aa, Artificial Sequence
  Cyclic GFR-binding peptide
EPISILYLDKGVVTYKFKYEEYVRKKPKL

SEQ ID NO: 129566 - protein, 29 aa, Artificial Sequence
  Cyclic GFR-binding peptide
EPISILYLDAANNVVKFKYEEYVRKKPKL

SEQ ID NO: 129567 - protein, 29 aa, Artificial Sequence
  Cyclic GFR-binding peptide
EYVRKKPKLPIKGYIIQQKDNFYLMNIPS

SEQ ID NO: 129568 - protein, 29 aa, Artificial Sequence
  Cyclic GFR-binding peptide
EYVRKKPKLPIKGYVVKDYEDFYLMNIPS

SEQ ID NO: 129569 - protein, 29 aa, Artificial Sequence
  Cyclic GFR-binding peptide
EYVRKKPKLPIKGYIVNSSDDFYLVNIPS

SEQ ID NO: 129570 - protein, 29 aa, Artificial Sequence
  Cyclic GFR-binding peptide
EYVRKKPKLPIKGYLLVRGNDFYLMNIPS

SEQ ID NO: 129571 - protein, 29 aa, Artificial Sequence
  Cyclic GFR-binding peptide
EYVRKKPKLPIKGYVVNNAADFYLINIPS

SEQ ID NO: 129572 - protein, 29 aa, Artificial Sequence
  Cyclic GFR-binding peptide
EYVRKKPKLPIKGYVVKENEDFYLMNIPS

SEQ ID NO: 129573 - protein, 29 aa, Artificial Sequence
  Cyclic GFR-binding peptide
EYVRKKPKLPIKGYVVNNASDFYLINIPS

SEQ ID NO: 129574 - protein, 29 aa, Artificial Sequence
  Cyclic GFR-binding peptide
EYVRKKPKLPIKGYYTVVGKDFYLINIPS

SEQ ID NO: 129575 - protein, 29 aa, Artificial Sequence
  Cyclic GFR-binding peptide
EYVRKKPKLPIKGYTPVGMDDFYLVNIPS

SEQ ID NO: 129576 - protein, 29 aa, Artificial Sequence
  Cyclic GFR-binding peptide
EYVRKKPKLPIKGYIVNNSSDFYLVNIPS

SEQ ID NO: 129577 - protein, 29 aa, Artificial Sequence
  Cyclic GFR-binding peptide
SPINMLYFNDKQQIIYGKIPEYVRKKPKL

SEQ ID NO: 129578 - protein, 29 aa, Artificial Sequence
  Cyclic GFR-binding peptide
SPINMLYFDEYDKVVYGKIPEYVRKKPKL

SEQ ID NO: 129579 - protein, 29 aa, Artificial Sequence
  Cyclic GFR-binding peptide
SPINVLYFDDSSNVIYGKIPEYVRKKPKL

SEQ ID NO: 129580 - protein, 29 aa, Artificial Sequence
  Cyclic GFR-binding peptide
SPINMLYFDNGRVLLYGKIPEYVRKKPKL

SEQ ID NO: 129581 - protein, 29 aa, Artificial Sequence
  Cyclic GFR-binding peptide
SPINILYFDAANNVVYGKIPEYVRKKPKL

SEQ ID NO: 129582 - protein, 29 aa, Artificial Sequence
  Cyclic GFR-binding peptide
SPINMLYFDENEKVVYGKIPEYVRKKPKL

SEQ ID NO: 129583 - protein, 29 aa, Artificial Sequence
  Cyclic GFR-binding peptide
SPINILYFDSANNVVYGKIPEYVRKKPKL

SEQ ID NO: 129584 - protein, 29 aa, Artificial Sequence
  Cyclic GFR-binding peptide
SPINILYFDKGVVTYYGKIPEYVRKKPKL

SEQ ID NO: 129585 - protein, 29 aa, Artificial Sequence
  Cyclic GFR-binding peptide
SPINVLYFDDMGVPTYGKIPEYVRKKPKL

SEQ ID NO: 129586 - protein, 29 aa, Artificial Sequence
  Cyclic GFR-binding peptide
SPINVLYFDSSNNVIYGKIPEYVRKKPKL

SEQ ID NO: 129587 - protein, 29 aa, Artificial Sequence
  Cyclic GFR-binding peptide
EYVRKKPKLPIKGYIIQQKDNFYLMNIPS

SEQ ID NO: 129588 - protein, 29 aa, Artificial Sequence
  Cyclic GFR-binding peptide
EYVRKKPKLPIKGYVVKDYEDFYLMNIPS

SEQ ID NO: 129589 - protein, 29 aa, Artificial Sequence
  Cyclic GFR-binding peptide
EYVRKKPKLPIKGYIVNSSDDFYLVNIPS

SEQ ID NO: 129590 - protein, 29 aa, Artificial Sequence
  Cyclic GFR-binding peptide
EYVRKKPKLPIKGYLLVRGNDFYLMNIPS

SEQ ID NO: 129591 - protein, 29 aa, Artificial Sequence
  Cyclic GFR-binding peptide
EYVRKKPKLPIKGYVVNNAADFYLINIPS

SEQ ID NO: 129592 - protein, 29 aa, Artificial Sequence
  Cyclic GFR-binding peptide
EYVRKKPKLPIKGYVVKENEDFYLMNIPS

SEQ ID NO: 129593 - protein, 29 aa, Artificial Sequence
  Cyclic GFR-binding peptide
EYVRKKPKLPIKGYVVNNASDFYLINIPS

SEQ ID NO: 129594 - protein, 29 aa, Artificial Sequence
  Cyclic GFR-binding peptide
EYVRKKPKLPIKGYYTVVGKDFYLINIPS

SEQ ID NO: 129595 - protein, 29 aa, Artificial Sequence
  Cyclic GFR-binding peptide
EYVRKKPKLPIKGYTPVGMDDFYLVNIPS

SEQ ID NO: 129596 - protein, 29 aa, Artificial Sequence
  Cyclic GFR-binding peptide
EYVRKKPKLPIKGYIVNNSSDFYLVNIPS

SEQ ID NO: 129597 - protein, 29 aa, Artificial Sequence
  Cyclic GFR-binding peptide
SPINMLYFNDKQQIIYGKIPEYVRKKPKL

SEQ ID NO: 129598 - protein, 29 aa, Artificial Sequence
  Cyclic GFR-binding peptide
SPINMLYFDEYDKVVYGKIPEYVRKKPKL

SEQ ID NO: 129599 - protein, 29 aa, Artificial Sequence
  Cyclic GFR-binding peptide
SPINVLYFDDSSNVIYGKIPEYVRKKPKL

SEQ ID NO: 129600 - protein, 29 aa, Artificial Sequence
  Cyclic GFR-binding peptide
SPINMLYFDNGRVLLYGKIPEYVRKKPKL

SEQ ID NO: 129601 - protein, 29 aa, Artificial Sequence
  Cyclic GFR-binding peptide
SPINILYFDAANNVVYGKIPEYVRKKPKL

SEQ ID NO: 129602 - protein, 29 aa, Artificial Sequence
  Cyclic GFR-binding peptide
SPINMLYFDENEKVVYGKIPEYVRKKPKL

SEQ ID NO: 129603 - protein, 29 aa, Artificial Sequence
  Cyclic GFR-binding peptide
SPINILYFDSANNVVYGKIPEYVRKKPKL

SEQ ID NO: 129604 - protein, 29 aa, Artificial Sequence
  Cyclic GFR-binding peptide
SPINILYFDKGVVTYYGKIPEYVRKKPKL

SEQ ID NO: 129605 - protein, 29 aa, Artificial Sequence
  Cyclic GFR-binding peptide
SPINVLYFDDMGVPTYGKIPEYVRKKPKL

SEQ ID NO: 129606 - protein, 29 aa, Artificial Sequence
  Cyclic GFR-binding peptide
SPINVLYFDSSNNVIYGKIPEYVRKKPKL

SEQ ID NO: 129607 - protein, 29 aa, Artificial Sequence
  Cyclic GFR-binding peptide
EYVRKKPKLRYKKLIKPTKGIFYLISIAN

SEQ ID NO: 129608 - protein, 29 aa, Artificial Sequence
  Cyclic GFR-binding peptide
EYVRKKPKLRYKKLVVKDYEDFYLMSIAN

SEQ ID NO: 129609 - protein, 29 aa, Artificial Sequence
  Cyclic GFR-binding peptide
EYVRKKPKLRYKKLVKPTRGVFYLISIAN

SEQ ID NO: 129610 - protein, 29 aa, Artificial Sequence
  Cyclic GFR-binding peptide
EYVRKKPKLRYKKLVVKENEDFYLMSIAN

SEQ ID NO: 129611 - protein, 29 aa, Artificial Sequence
  Cyclic GFR-binding peptide
EYVRKKPKLRYKKLVKPKRGVFYLISIAN

SEQ ID NO: 129612 - protein, 29 aa, Artificial Sequence
  Cyclic GFR-binding peptide
EYVRKKPKLRYKKLIVNSSDDFYLVSIAN

SEQ ID NO: 129613 - protein, 29 aa, Artificial Sequence
  Cyclic GFR-binding peptide
EYVRKKPKLRYKKLVVNNASDFYLISIAN

SEQ ID NO: 129614 - protein, 29 aa, Artificial Sequence
  Cyclic GFR-binding peptide
NAISILYFIGKTPKILKKYREYVRKKPKL

SEQ ID NO: 129615 - protein, 29 aa, Artificial Sequence
  Cyclic GFR-binding peptide
NAISMLYFDEYDKVVLKKYREYVRKKPKL

SEQ ID NO: 129616 - protein, 29 aa, Artificial Sequence
  Cyclic GFR-binding peptide
NAISILYFVGRTPKVLKKYREYVRKKPKL

SEQ ID NO: 129617 - protein, 29 aa, Artificial Sequence
  Cyclic GFR-binding peptide
NAISMLYFDENEKVVLKKYREYVRKKPKL

SEQ ID NO: 129618 - protein, 29 aa, Artificial Sequence
  Cyclic GFR-binding peptide
NAISILYFVGRKPKVLKKYREYVRKKPKL

SEQ ID NO: 129619 - protein, 29 aa, Artificial Sequence
  Cyclic GFR-binding peptide
NAISVLYFDDSSNVILKKYREYVRKKPKL

SEQ ID NO: 129620 - protein, 29 aa, Artificial Sequence
  Cyclic GFR-binding peptide
NAISILYFDSANNVVLKKYREYVRKKPKL

SEQ ID NO: 129621 - protein, 29 aa, Artificial Sequence
  Cyclic GFR-binding peptide
EYVRKKPKLEYQKYVVKENEDIYLMSIPS

SEQ ID NO: 129622 - protein, 29 aa, Artificial Sequence
  Cyclic GFR-binding peptide
EYVRKKPKLNSLQEVVKDYEDYYLMTLPE

SEQ ID NO: 129623 - protein, 29 aa, Artificial Sequence
  Cyclic GFR-binding peptide
EYVRKKPKLEYQKYVVKENEDIFLMSIPS

SEQ ID NO: 129624 - protein, 29 aa, Artificial Sequence
  Cyclic GFR-binding peptide
EYVRKKPKLNSLQEIKPTKGIYYVIPLPE

SEQ ID NO: 129625 - protein, 29 aa, Artificial Sequence
  Cyclic GFR-binding peptide
EYVRKKPKLNSLQEVKPKRGVYYLITLPE

SEQ ID NO: 129626 - protein, 29 aa, Artificial Sequence
  Cyclic GFR-binding peptide
EYVRKKPKLEYQKYVVNNAADIYLISIPS

SEQ ID NO: 129627 - protein, 29 aa, Artificial Sequence
  Cyclic GFR-binding peptide
EYVRKKPKLNSLQEVKPTRGVYYVIPLPE

SEQ ID NO: 129628 - protein, 29 aa, Artificial Sequence
  Cyclic GFR-binding peptide
EYVRKKPKLEYQKYIVNSSDDIFLVSIPS

SEQ ID NO: 129629 - protein, 29 aa, Artificial Sequence
  Cyclic GFR-binding peptide
EYVRKKPKLEYQKYVKPTRGVIFLISIPS

SEQ ID NO: 129630 - protein, 29 aa, Artificial Sequence
  Cyclic GFR-binding peptide
EYVRKKPKLEYQKYVVKDYEDIYLMSIPS

SEQ ID NO: 129631 - protein, 29 aa, Artificial Sequence
  Cyclic GFR-binding peptide
EYVRKKPKLNSLQEVVKENEDYYLMTLPE

SEQ ID NO: 129632 - protein, 29 aa, Artificial Sequence
  Cyclic GFR-binding peptide
EYVRKKPKLNSLQEVVNNASDYYLITLPE

SEQ ID NO: 129633 - protein, 29 aa, Artificial Sequence
  Cyclic GFR-binding peptide
EYVRKKPKLNSLQEVKPKRGVYYVIPLPE

SEQ ID NO: 129634 - protein, 29 aa, Artificial Sequence
  Cyclic GFR-binding peptide
EYVRKKPKLEYQKYIVNSSDDIYLVSIPS

SEQ ID NO: 129635 - protein, 29 aa, Artificial Sequence
  Cyclic GFR-binding peptide
EYVRKKPKLNSLQEVVKENEDYYVMPLPE

SEQ ID NO: 129636 - protein, 29 aa, Artificial Sequence
  Cyclic GFR-binding peptide
EYVRKKPKLEYQKYVVKDYEDIFLMSIPS

SEQ ID NO: 129637 - protein, 29 aa, Artificial Sequence
  Cyclic GFR-binding peptide
EYVRKKPKLNSLQEVVNNASDYYVIPLPE

SEQ ID NO: 129638 - protein, 29 aa, Artificial Sequence
  Cyclic GFR-binding peptide
EYVRKKPKLEYQKYVVNNASDIYLISIPS

SEQ ID NO: 129639 - protein, 29 aa, Artificial Sequence
  Cyclic GFR-binding peptide
EYVRKKPKLNSLQEVKPTRGVYYLITLPE

SEQ ID NO: 129640 - protein, 29 aa, Artificial Sequence
  Cyclic GFR-binding peptide
EYVRKKPKLEYQKYYTVVGKDIYLISIPS

SEQ ID NO: 129641 - protein, 29 aa, Artificial Sequence
  Cyclic GFR-binding peptide
EYVRKKPKLEYQKYIIQQKDNIYLMSIPS

SEQ ID NO: 129642 - protein, 29 aa, Artificial Sequence
  Cyclic GFR-binding peptide
EYVRKKPKLEYQKYTPVGMDDIYLVSIPS

SEQ ID NO: 129643 - protein, 29 aa, Artificial Sequence
  Cyclic GFR-binding peptide
EYVRKKPKLEYQKYIKPTKGIIFLISIPS

SEQ ID NO: 129644 - protein, 29 aa, Artificial Sequence
  Cyclic GFR-binding peptide
EYVRKKPKLEYQKYIVNNSSDIYLVSIPS

SEQ ID NO: 129645 - protein, 29 aa, Artificial Sequence
  Cyclic GFR-binding peptide
EYVRKKPKLNSLQEIKPTKGIYYLITLPE

SEQ ID NO: 129646 - protein, 29 aa, Artificial Sequence
  Cyclic GFR-binding peptide
EYVRKKPKLEYQKYVVNNASDIFLISIPS

SEQ ID NO: 129647 - protein, 29 aa, Artificial Sequence
  Cyclic GFR-binding peptide
EYVRKKPKLEYQKYVKPKRGVIFLISIPS

SEQ ID NO: 129648 - protein, 29 aa, Artificial Sequence
  Cyclic GFR-binding peptide
EYVRKKPKLNSLQEIVNSSDDYYVVPLPE

SEQ ID NO: 129649 - protein, 29 aa, Artificial Sequence
  Cyclic GFR-binding peptide
EYVRKKPKLNSLQEVVKDYEDYYVMPLPE

SEQ ID NO: 129650 - protein, 29 aa, Artificial Sequence
  Cyclic GFR-binding peptide
EYVRKKPKLEYQKYLLVRGNDIYLMSIPS

SEQ ID NO: 129651 - protein, 29 aa, Artificial Sequence
  Cyclic GFR-binding peptide
EYVRKKPKLNSLQEIVNSSDDYYLVTLPE

SEQ ID NO: 129652 - protein, 29 aa, Artificial Sequence
  Cyclic GFR-binding peptide
SPISMLYIDENEKVVYKQYEEYVRKKPKL

SEQ ID NO: 129653 - protein, 29 aa, Artificial Sequence
  Cyclic GFR-binding peptide
EPLTMLYYDEYDKVVEQLSNEYVRKKPKL

SEQ ID NO: 129654 - protein, 29 aa, Artificial Sequence
  Cyclic GFR-binding peptide
SPISMLFIDENEKVVYKQYEEYVRKKPKL

SEQ ID NO: 129655 - protein, 29 aa, Artificial Sequence
  Cyclic GFR-binding peptide
EPLPIVYYIGKTPKIEQLSNEYVRKKPKL

SEQ ID NO: 129656 - protein, 29 aa, Artificial Sequence
  Cyclic GFR-binding peptide
EPLTILYYVGRKPKVEQLSNEYVRKKPKL

SEQ ID NO: 129657 - protein, 29 aa, Artificial Sequence
  Cyclic GFR-binding peptide
SPISILYIDAANNVVYKQYEEYVRKKPKL

SEQ ID NO: 129658 - protein, 29 aa, Artificial Sequence
  Cyclic GFR-binding peptide
EPLPIVYYVGRTPKVEQLSNEYVRKKPKL

SEQ ID NO: 129659 - protein, 29 aa, Artificial Sequence
  Cyclic GFR-binding peptide
SPISVLFIDDSSNVIYKQYEEYVRKKPKL

SEQ ID NO: 129660 - protein, 29 aa, Artificial Sequence
  Cyclic GFR-binding peptide
SPISILFIVGRTPKVYKQYEEYVRKKPKL

SEQ ID NO: 129661 - protein, 29 aa, Artificial Sequence
  Cyclic GFR-binding peptide
SPISMLYIDEYDKVVYKQYEEYVRKKPKL

SEQ ID NO: 129662 - protein, 29 aa, Artificial Sequence
  Cyclic GFR-binding peptide
EPLTMLYYDENEKVVEQLSNEYVRKKPKL

SEQ ID NO: 129663 - protein, 29 aa, Artificial Sequence
  Cyclic GFR-binding peptide
EPLTILYYDSANNVVEQLSNEYVRKKPKL

SEQ ID NO: 129664 - protein, 29 aa, Artificial Sequence
  Cyclic GFR-binding peptide
EPLPIVYYVGRKPKVEQLSNEYVRKKPKL

SEQ ID NO: 129665 - protein, 29 aa, Artificial Sequence
  Cyclic GFR-binding peptide
SPISVLYIDDSSNVIYKQYEEYVRKKPKL

SEQ ID NO: 129666 - protein, 29 aa, Artificial Sequence
  Cyclic GFR-binding peptide
EPLPMVYYDENEKVVEQLSNEYVRKKPKL

SEQ ID NO: 129667 - protein, 29 aa, Artificial Sequence
  Cyclic GFR-binding peptide
SPISMLFIDEYDKVVYKQYEEYVRKKPKL

SEQ ID NO: 129668 - protein, 29 aa, Artificial Sequence
  Cyclic GFR-binding peptide
EPLPIVYYDSANNVVEQLSNEYVRKKPKL

SEQ ID NO: 129669 - protein, 29 aa, Artificial Sequence
  Cyclic GFR-binding peptide
SPISILYIDSANNVVYKQYEEYVRKKPKL

SEQ ID NO: 129670 - protein, 29 aa, Artificial Sequence
  Cyclic GFR-binding peptide
EPLTILYYVGRTPKVEQLSNEYVRKKPKL

SEQ ID NO: 129671 - protein, 29 aa, Artificial Sequence
  Cyclic GFR-binding peptide
SPISILYIDKGVVTYYKQYEEYVRKKPKL

SEQ ID NO: 129672 - protein, 29 aa, Artificial Sequence
  Cyclic GFR-binding peptide
SPISMLYINDKQQIIYKQYEEYVRKKPKL

SEQ ID NO: 129673 - protein, 29 aa, Artificial Sequence
  Cyclic GFR-binding peptide
SPISVLYIDDMGVPTYKQYEEYVRKKPKL

SEQ ID NO: 129674 - protein, 29 aa, Artificial Sequence
  Cyclic GFR-binding peptide
SPISILFIIGKTPKIYKQYEEYVRKKPKL

SEQ ID NO: 129675 - protein, 29 aa, Artificial Sequence
  Cyclic GFR-binding peptide
SPISVLYIDSSNNVIYKQYEEYVRKKPKL

SEQ ID NO: 129676 - protein, 29 aa, Artificial Sequence
  Cyclic GFR-binding peptide
EPLTILYYIGKTPKIEQLSNEYVRKKPKL

SEQ ID NO: 129677 - protein, 29 aa, Artificial Sequence
  Cyclic GFR-binding peptide
SPISILFIDSANNVVYKQYEEYVRKKPKL

SEQ ID NO: 129678 - protein, 29 aa, Artificial Sequence
  Cyclic GFR-binding peptide
SPISILFIVGRKPKVYKQYEEYVRKKPKL

SEQ ID NO: 129679 - protein, 29 aa, Artificial Sequence
  Cyclic GFR-binding peptide
EPLPVVYYDDSSNVIEQLSNEYVRKKPKL

SEQ ID NO: 129680 - protein, 29 aa, Artificial Sequence
  Cyclic GFR-binding peptide
EPLPMVYYDEYDKVVEQLSNEYVRKKPKL

SEQ ID NO: 129681 - protein, 29 aa, Artificial Sequence
  Cyclic GFR-binding peptide
SPISMLYIDNGRVLLYKQYEEYVRKKPKL

SEQ ID NO: 129682 - protein, 29 aa, Artificial Sequence
  Cyclic GFR-binding peptide
EPLTVLYYDDSSNVIEQLSNEYVRKKPKL

SEQ ID NO: 129683 - protein, 29 aa, Artificial Sequence
  Cyclic GFR-binding peptide
EYVRKKPKLPYVKLVVKENEDFFLMSLSS

SEQ ID NO: 129684 - protein, 31 aa, Artificial Sequence
  Cyclic GFR-binding peptide
EYVRKKPKLPYVKLHQGQHPKIRFFLMSLSS

SEQ ID NO: 129685 - protein, 29 aa, Artificial Sequence
  Cyclic GFR-binding peptide
EYVRKKPKLPYVKLVVNKNEDFFLISLSS

SEQ ID NO: 129686 - protein, 29 aa, Artificial Sequence
  Cyclic GFR-binding peptide
EYVRKKPKLPYVKLVKPKRGVLFFISLSS

SEQ ID NO: 129687 - protein, 29 aa, Artificial Sequence
  Cyclic GFR-binding peptide
EYVRKKPKLPYVKLVVNNAADFFLISLSS

SEQ ID NO: 129688 - protein, 29 aa, Artificial Sequence
  Cyclic GFR-binding peptide
EYVRKKPKLPYVKLIVNNSSDFFLVSLSS

SEQ ID NO: 129689 - protein, 29 aa, Artificial Sequence
  Cyclic GFR-binding peptide
EYVRKKPKLPYVKLIIQQKDNFFLMSLSS

SEQ ID NO: 129690 - protein, 29 aa, Artificial Sequence
  Cyclic GFR-binding peptide
EYVRKKPKLPYVKLLLVRGNDFFLMSLSS

SEQ ID NO: 129691 - protein, 29 aa, Artificial Sequence
  Cyclic GFR-binding peptide
EYVRKKPKLPYVKLVKPTRGVLFFISLSS

SEQ ID NO: 129692 - protein, 29 aa, Artificial Sequence
  Cyclic GFR-binding peptide
EYVRKKPKLPYVKLVVNNASDFFLISLSS

SEQ ID NO: 129693 - protein, 29 aa, Artificial Sequence
  Cyclic GFR-binding peptide
EYVRKKPKLPYVKLIKPTKGILFFISLSS

SEQ ID NO: 129694 - protein, 29 aa, Artificial Sequence
  Cyclic GFR-binding peptide
EYVRKKPKLPYVKLTPVGMDDFFLVSLSS

SEQ ID NO: 129695 - protein, 29 aa, Artificial Sequence
  Cyclic GFR-binding peptide
EYVRKKPKLPYVKLYTVVGKDFFLISLSS

SEQ ID NO: 129696 - protein, 29 aa, Artificial Sequence
  Cyclic GFR-binding peptide
EYVRKKPKLPYVKLVVKDYEDFFLMSLSS

SEQ ID NO: 129697 - protein, 29 aa, Artificial Sequence
  Cyclic GFR-binding peptide
EYVRKKPKLPYVKLIVNSSDDFFLVSLSS

SEQ ID NO: 129698 - protein, 31 aa, Artificial Sequence
  Cyclic GFR-binding peptide
EYVRKKPKLPYVKLLKPKKRVYEFFLVSLSS

SEQ ID NO: 129699 - protein, 29 aa, Artificial Sequence
  Cyclic GFR-binding peptide
SSLSMLFFDENEKVVLKVYPEYVRKKPKL

SEQ ID NO: 129700 - protein, 31 aa, Artificial Sequence
  Cyclic GFR-binding peptide
SSLSMLFFRIKPHQGQHLKVYPEYVRKKPKL

SEQ ID NO: 129701 - protein, 29 aa, Artificial Sequence
  Cyclic GFR-binding peptide
SSLSILFFDENKNVVLKVYPEYVRKKPKL

SEQ ID NO: 129702 - protein, 29 aa, Artificial Sequence
  Cyclic GFR-binding peptide
SSLSILFFVGRKPKVLKVYPEYVRKKPKL

SEQ ID NO: 129703 - protein, 29 aa, Artificial Sequence
  Cyclic GFR-binding peptide
SSLSILFFDAANNVVLKVYPEYVRKKPKL

SEQ ID NO: 129704 - protein, 29 aa, Artificial Sequence
  Cyclic GFR-binding peptide
SSLSVLFFDSSNNVILKVYPEYVRKKPKL

SEQ ID NO: 129705 - protein, 29 aa, Artificial Sequence
  Cyclic GFR-binding peptide
SSLSMLFFNDKQQIILKVYPEYVRKKPKL

SEQ ID NO: 129706 - protein, 29 aa, Artificial Sequence
  Cyclic GFR-binding peptide
SSLSMLFFDNGRVLLLKVYPEYVRKKPKL

SEQ ID NO: 129707 - protein, 29 aa, Artificial Sequence
  Cyclic GFR-binding peptide
SSLSILFFVGRTPKVLKVYPEYVRKKPKL

SEQ ID NO: 129708 - protein, 29 aa, Artificial Sequence
  Cyclic GFR-binding peptide
SSLSILFFDSANNVVLKVYPEYVRKKPKL

SEQ ID NO: 129709 - protein, 29 aa, Artificial Sequence
  Cyclic GFR-binding peptide
SSLSILFFIGKTPKILKVYPEYVRKKPKL

SEQ ID NO: 129710 - protein, 29 aa, Artificial Sequence
  Cyclic GFR-binding peptide
SSLSVLFFDDMGVPTLKVYPEYVRKKPKL

SEQ ID NO: 129711 - protein, 29 aa, Artificial Sequence
  Cyclic GFR-binding peptide
SSLSILFFDKGVVTYLKVYPEYVRKKPKL

SEQ ID NO: 129712 - protein, 29 aa, Artificial Sequence
  Cyclic GFR-binding peptide
SSLSMLFFDEYDKVVLKVYPEYVRKKPKL

SEQ ID NO: 129713 - protein, 29 aa, Artificial Sequence
  Cyclic GFR-binding peptide
SSLSVLFFDDSSNVILKVYPEYVRKKPKL

SEQ ID NO: 129714 - protein, 31 aa, Artificial Sequence
  Cyclic GFR-binding peptide
SSLSVLFFEYVRKKPKLLKVYPEYVRKKPKL

SEQ ID NO: 129715 - protein, 29 aa, Artificial Sequence
  Cyclic GFR-binding peptide
EYVRKKPKLNSLQEVVKDYEDYYLMTLPE

SEQ ID NO: 129716 - protein, 29 aa, Artificial Sequence
  Cyclic GFR-binding peptide
EYVRKKPKLNSLQEIKPTKGIYYVIPLPE

SEQ ID NO: 129717 - protein, 29 aa, Artificial Sequence
  Cyclic GFR-binding peptide
EYVRKKPKLSMEGIIVNSSDDMIQVTINS

SEQ ID NO: 129718 - protein, 29 aa, Artificial Sequence
  Cyclic GFR-binding peptide
EYVRKKPKLNSLQEVKPKRGVYYLITLPE

SEQ ID NO: 129719 - protein, 29 aa, Artificial Sequence
  Cyclic GFR-binding peptide
EYVRKKPKLNSLQEVKPTRGVYYVIPLPE

SEQ ID NO: 129720 - protein, 29 aa, Artificial Sequence
  Cyclic GFR-binding peptide
EYVRKKPKLVTAKKVVKENEDIKRMQVPR

SEQ ID NO: 129721 - protein, 29 aa, Artificial Sequence
  Cyclic GFR-binding peptide
EYVRKKPKLNSLQEIVNSSDDYYVVPLPE

SEQ ID NO: 129722 - protein, 31 aa, Artificial Sequence; identical to SEQ ID NO: 129450
  Cyclic GFR-binding peptide

SEQ ID NO: 129723 - protein, 31 aa, Artificial Sequence; identical to SEQ ID NO: 129439
  Cyclic GFR-binding peptide

SEQ ID NO: 129724 - protein, 29 aa, Artificial Sequence
  Cyclic GFR-binding peptide
EYVRKKPKLSMEGIVVKDYEDMIQMTINS

SEQ ID NO: 129725 - protein, 31 aa, Artificial Sequence; identical to SEQ ID NO: 129442
  Cyclic GFR-binding peptide

SEQ ID NO: 129726 - protein, 29 aa, Artificial Sequence
  Cyclic GFR-binding peptide
EYVRKKPKLVTAKKIKPTKGIIKRIQVPR

SEQ ID NO: 129727 - protein, 29 aa, Artificial Sequence
  Cyclic GFR-binding peptide
EYVRKKPKLSMEGIVKPTRGVMIQITINS

SEQ ID NO: 129728 - protein, 31 aa, Artificial Sequence
  Cyclic GFR-binding peptide
EYVRKKPKLNSLQEFIPKKRVIEYYVVPLPE

SEQ ID NO: 129729 - protein, 29 aa, Artificial Sequence
  Cyclic GFR-binding peptide
EYVRKKPKLVQVEKVKPKRGVVKAIKVSR

SEQ ID NO: 129730 - protein, 29 aa, Artificial Sequence
  Cyclic GFR-binding peptide
EYVRKKPKLVQVEKVVKENEDVKAMKVSR

SEQ ID NO: 129731 - protein, 29 aa, Artificial Sequence
  Cyclic GFR-binding peptide
EYVRKKPKLNSLQEVVKENEDYYVMPLPE

SEQ ID NO: 129732 - protein, 29 aa, Artificial Sequence
  Cyclic GFR-binding peptide
EYVRKKPKLVTAKKIVNSSDDIKRVQVPR

SEQ ID NO: 129733 - protein, 29 aa, Artificial Sequence
  Cyclic GFR-binding peptide
EYVRKKPKLVQVEKIKPTKGIVKAIKVSR

SEQ ID NO: 129734 - protein, 29 aa, Artificial Sequence
  Cyclic GFR-binding peptide
EYVRKKPKLNSLQEIKPTKGIYYLITLPE

SEQ ID NO: 129735 - protein, 31 aa, Artificial Sequence
  Cyclic GFR-binding peptide
EYVRKKPKLNSLQEFIPKKRVIEYYLVTLPE

SEQ ID NO: 129736 - protein, 29 aa, Artificial Sequence
  Cyclic GFR-binding peptide
EYVRKKPKLVQVEKIVNSSDDVKAVKVSR

SEQ ID NO: 129737 - protein, 29 aa, Artificial Sequence
  Cyclic GFR-binding peptide
EYVRKKPKLNSLQEIVNSSDDYYLVTLPE

SEQ ID NO: 129738 - protein, 31 aa, Artificial Sequence; identical to SEQ ID NO: 129440
  Cyclic GFR-binding peptide

SEQ ID NO: 129739 - protein, 31 aa, Artificial Sequence; identical to SEQ ID NO: 129441
  Cyclic GFR-binding peptide

SEQ ID NO: 129740 - protein, 31 aa, Artificial Sequence; identical to SEQ ID NO: 129443
  Cyclic GFR-binding peptide

SEQ ID NO: 129741 - protein, 29 aa, Artificial Sequence
  Cyclic GFR-binding peptide
EYVRKKPKLNSLQEVVKENEDYYLMTLPE

SEQ ID NO: 129742 - protein, 31 aa, Artificial Sequence; identical to SEQ ID NO: 129445
  Cyclic GFR-binding peptide

SEQ ID NO: 129743 - protein, 29 aa, Artificial Sequence
  Cyclic GFR-binding peptide
EYVRKKPKLNSLQEVKPKRGVYYVIPLPE

SEQ ID NO: 129744 - protein, 29 aa, Artificial Sequence
  Cyclic GFR-binding peptide
EYVRKKPKLVTAKKVKPKRGVIKRIQVPR

SEQ ID NO: 129745 - protein, 29 aa, Artificial Sequence
  Cyclic GFR-binding peptide
EYVRKKPKLNSLQEVKPTRGVYYLITLPE

SEQ ID NO: 129746 - protein, 29 aa, Artificial Sequence
  Cyclic GFR-binding peptide
EYVRKKPKLVQVEKVKPTRGVVKAIKVSR

SEQ ID NO: 129747 - protein, 31 aa, Artificial Sequence; identical to SEQ ID NO: 129447
  Cyclic GFR-binding peptide

SEQ ID NO: 129748 - protein, 29 aa, Artificial Sequence
  Cyclic GFR-binding peptide
EYVRKKPKLNSLQEVVKDYEDYYVMPLPE

SEQ ID NO: 129749 - protein, 29 aa, Artificial Sequence
  Cyclic GFR-binding peptide
EYVRKKPKLVTAKKVKPTRGVIKRIQVPR

SEQ ID NO: 129750 - protein, 31 aa, Artificial Sequence
  Cyclic GFR-binding peptide
EYVRKKPKLNSLQELKPKKRVYEYYLVTLPE

SEQ ID NO: 129751 - protein, 29 aa, Artificial Sequence
  Cyclic GFR-binding peptide
EYVRKKPKLSMEGIVKPKRGVMIQITINS

SEQ ID NO: 129752 - protein, 29 aa, Artificial Sequence
  Cyclic GFR-binding peptide
EYVRKKPKLSMEGIVVKENEDMIQMTINS

SEQ ID NO: 129753 - protein, 29 aa, Artificial Sequence
  Cyclic GFR-binding peptide
EYVRKKPKLSMEGIIKPTKGIMIQITINS

SEQ ID NO: 129754 - protein, 31 aa, Artificial Sequence
  Cyclic GFR-binding peptide
EYVRKKPKLNSLQEHQGQHPKIRYYLMTLPE

SEQ ID NO: 129755 - protein, 29 aa, Artificial Sequence
  Cyclic GFR-binding peptide
EYVRKKPKLVTAKKVVKDYEDIKRMQVPR

SEQ ID NO: 129756 - protein, 31 aa, Artificial Sequence
  Cyclic GFR-binding peptide
EYVRKKPKLNSLQEHQGQHPKIRYYVMPLPE

SEQ ID NO: 129757 - protein, 31 aa, Artificial Sequence
  Cyclic GFR-binding peptide
EYVRKKPKLNSLQELKPKKRVYEYYVVPLPE

SEQ ID NO: 129758 - protein, 31 aa, Artificial Sequence; identical to SEQ ID NO: 129449
  Cyclic GFR-binding peptide

SEQ ID NO: 129759 - protein, 29 aa, Artificial Sequence
  Cyclic GFR-binding peptide
EYVRKKPKLVQVEKVVKDYEDVKAMKVSR

SEQ ID NO: 129760 - protein, 29 aa, Artificial Sequence
  Cyclic GFR-binding peptide
EPLTMLYYDEYDKVVEQLSNEYVRKKPKL

SEQ ID NO: 129761 - protein, 29 aa, Artificial Sequence
  Cyclic GFR-binding peptide
EPLPIVYYIGKTPKIEQLSNEYVRKKPKL

SEQ ID NO: 129762 - protein, 29 aa, Artificial Sequence
  Cyclic GFR-binding peptide
SNITVQIMDDSSNVIIGEMSEYVRKKPKL

SEQ ID NO: 129763 - protein, 29 aa, Artificial Sequence
  Cyclic GFR-binding peptide
EPLTILYYVGRKPKVEQLSNEYVRKKPKL

SEQ ID NO: 129764 - protein, 29 aa, Artificial Sequence
  Cyclic GFR-binding peptide
EPLPIVYYVGRTPKVEQLSNEYVRKKPKL

SEQ ID NO: 129765 - protein, 29 aa, Artificial Sequence
  Cyclic GFR-binding peptide
RPVQMRKIDENEKVVKKATVEYVRKKPKL

SEQ ID NO: 129766 - protein, 29 aa, Artificial Sequence
  Cyclic GFR-binding peptide
EPLPVVYYDDSSNVIEQLSNEYVRKKPKL

SEQ ID NO: 129767 - protein, 31 aa, Artificial Sequence; identical to SEQ ID NO: 129462
  Cyclic GFR-binding peptide

SEQ ID NO: 129768 - protein, 31 aa, Artificial Sequence; identical to SEQ ID NO: 129451
  Cyclic GFR-binding peptide

SEQ ID NO: 129769 - protein, 29 aa, Artificial Sequence
  Cyclic GFR-binding peptide
SNITMQIMDEYDKVVIGEMSEYVRKKPKL

SEQ ID NO: 129770 - protein, 31 aa, Artificial Sequence; identical to SEQ ID NO: 129454
  Cyclic GFR-binding peptide

SEQ ID NO: 129771 - protein, 29 aa, Artificial Sequence
  Cyclic GFR-binding peptide
RPVQIRKIIGKTPKIKKATVEYVRKKPKL

SEQ ID NO: 129772 - protein, 29 aa, Artificial Sequence
  Cyclic GFR-binding peptide
SNITIQIMVGRTPKVIGEMSEYVRKKPKL

SEQ ID NO: 129773 - protein, 31 aa, Artificial Sequence
  Cyclic GFR-binding peptide
EPLPVVYYEIVRKKPIFEQLSNEYVRKKPKL

SEQ ID NO: 129774 - protein, 29 aa, Artificial Sequence
  Cyclic GFR-binding peptide
RSVKIAKVVGRKPKVKEVQVEYVRKKPKL

SEQ ID NO: 129775 - protein, 29 aa, Artificial Sequence
  Cyclic GFR-binding peptide
RSVKMAKVDENEKVVKEVQVEYVRKKPKL

SEQ ID NO: 129776 - protein, 29 aa, Artificial Sequence
  Cyclic GFR-binding peptide
EPLPMVYYDENEKVVEQLSNEYVRKKPKL

SEQ ID NO: 129777 - protein, 29 aa, Artificial Sequence
  Cyclic GFR-binding peptide
RPVQVRKIDDSSNVIKKATVEYVRKKPKL

SEQ ID NO: 129778 - protein, 29 aa, Artificial Sequence
  Cyclic GFR-binding peptide
RSVKIAKVIGKTPKIKEVQVEYVRKKPKL

SEQ ID NO: 129779 - protein, 29 aa, Artificial Sequence
  Cyclic GFR-binding peptide
EPLTILYYIGKTPKIEQLSNEYVRKKPKL

SEQ ID NO: 129780 - protein, 31 aa, Artificial Sequence
  Cyclic GFR-binding peptide
EPLTVLYYEIVRKKPIFEQLSNEYVRKKPKL

SEQ ID NO: 129781 - protein, 29 aa, Artificial Sequence
  Cyclic GFR-binding peptide
RSVKVAKVDDSSNVIKEVQVEYVRKKPKL

SEQ ID NO: 129782 - protein, 29 aa, Artificial Sequence
  Cyclic GFR-binding peptide
EPLTVLYYDDSSNVIEQLSNEYVRKKPKL

SEQ ID NO: 129783 - protein, 31 aa, Artificial Sequence; identical to SEQ ID NO: 129452
  Cyclic GFR-binding peptide

SEQ ID NO: 129784 - protein, 31 aa, Artificial Sequence; identical to SEQ ID NO: 129453
  Cyclic GFR-binding peptide

SEQ ID NO: 129785 - protein, 31 aa, Artificial Sequence; identical to SEQ ID NO: 129455
  Cyclic GFR-binding peptide

SEQ ID NO: 129786 - protein, 29 aa, Artificial Sequence
  Cyclic GFR-binding peptide
EPLTMLYYDENEKVVEQLSNEYVRKKPKL

SEQ ID NO: 129787 - protein, 31 aa, Artificial Sequence; identical to SEQ ID NO: 129457
  Cyclic GFR-binding peptide

SEQ ID NO: 129788 - protein, 29 aa, Artificial Sequence
  Cyclic GFR-binding peptide
EPLPIVYYVGRKPKVEQLSNEYVRKKPKL

SEQ ID NO: 129789 - protein, 29 aa, Artificial Sequence
  Cyclic GFR-binding peptide
RPVQIRKIVGRKPKVKKATVEYVRKKPKL

SEQ ID NO: 129790 - protein, 29 aa, Artificial Sequence
  Cyclic GFR-binding peptide
EPLTILYYVGRTPKVEQLSNEYVRKKPKL

SEQ ID NO: 129791 - protein, 29 aa, Artificial Sequence
  Cyclic GFR-binding peptide
RSVKIAKVVGRTPKVKEVQVEYVRKKPKL

SEQ ID NO: 129792 - protein, 31 aa, Artificial Sequence; identical to SEQ ID NO: 129459
  Cyclic GFR-binding peptide

SEQ ID NO: 129793 - protein, 29 aa, Artificial Sequence
  Cyclic GFR-binding peptide
EPLPMVYYDEYDKVVEQLSNEYVRKKPKL

SEQ ID NO: 129794 - protein, 29 aa, Artificial Sequence
  Cyclic GFR-binding peptide
RPVQIRKIVGRTPKVKKATVEYVRKKPKL

SEQ ID NO: 129795 - protein, 31 aa, Artificial Sequence
  Cyclic GFR-binding peptide
EPLTVLYYEYVRKKPKLEQLSNEYVRKKPKL

SEQ ID NO: 129796 - protein, 29 aa, Artificial Sequence
  Cyclic GFR-binding peptide
SNITIQIMVGRKPKVIGEMSEYVRKKPKL

SEQ ID NO: 129797 - protein, 29 aa, Artificial Sequence
  Cyclic GFR-binding peptide
SNITMQIMDENEKVVIGEMSEYVRKKPKL

SEQ ID NO: 129798 - protein, 29 aa, Artificial Sequence
  Cyclic GFR-binding peptide
SNITIQIMIGKTPKIIGEMSEYVRKKPKL

SEQ ID NO: 129799 - protein, 31 aa, Artificial Sequence
  Cyclic GFR-binding peptide
EPLTMLYYRIKPHQGQHEQLSNEYVRKKPKL

SEQ ID NO: 129800 - protein, 29 aa, Artificial Sequence
  Cyclic GFR-binding peptide
RPVQMRKIDEYDKVVKKATVEYVRKKPKL

SEQ ID NO: 129801 - protein, 31 aa, Artificial Sequence
  Cyclic GFR-binding peptide
EPLPMVYYRIKPHQGQHEQLSNEYVRKKPKL

SEQ ID NO: 129802 - protein, 31 aa, Artificial Sequence
  Cyclic GFR-binding peptide
EPLPVVYYEYVRKKPKLEQLSNEYVRKKPKL

SEQ ID NO: 129803 - protein, 31 aa, Artificial Sequence; identical to SEQ ID NO: 129461
  Cyclic GFR-binding peptide

SEQ ID NO: 129804 - protein, 29 aa, Artificial Sequence
  Cyclic GFR-binding peptide
RSVKMAKVDEYDKVVKEVQVEYVRKKPKL

SEQ ID NO: 129805 - protein, 29 aa, Artificial Sequence
  Cyclic GFR-binding peptide
EYVRKKPKLRYKKLIIQQKDNFYLMSIAN

SEQ ID NO: 129806 - protein, 29 aa, Artificial Sequence
  Cyclic GFR-binding peptide
EYVRKKPKLRYKKLIVNNSSDFYLVSIAN

SEQ ID NO: 129807 - protein, 29 aa, Artificial Sequence
  Cyclic GFR-binding peptide
EYVRKKPKLRYKKLYTVVGKDFYLISIAN

SEQ ID NO: 129808 - protein, 29 aa, Artificial Sequence
  Cyclic GFR-binding peptide
EYVRKKPKLRYKKLIVNSSDDFYLVSIAN

SEQ ID NO: 129809 - protein, 29 aa, Artificial Sequence
  Cyclic GFR-binding peptide
EYVRKKPKLRYKKLVVKDYEDFYLMSIAN

SEQ ID NO: 129810 - protein, 29 aa, Artificial Sequence
  Cyclic GFR-binding peptide
EYVRKKPKLRYKKLLLVRGNDFYLMSIAN

SEQ ID NO: 129811 - protein, 29 aa, Artificial Sequence
  Cyclic GFR-binding peptide
EYVRKKPKLRYKKLVVKENEDFYLMSIAN

SEQ ID NO: 129812 - protein, 29 aa, Artificial Sequence
  Cyclic GFR-binding peptide
EYVRKKPKLRYKKLVVNNAADFYLISIAN

SEQ ID NO: 129813 - protein, 29 aa, Artificial Sequence
  Cyclic GFR-binding peptide
EYVRKKPKLRYKKLTPVGMDDFYLVSIAN

SEQ ID NO: 129814 - protein, 29 aa, Artificial Sequence
  Cyclic GFR-binding peptide
EYVRKKPKLRYKKLVVNNASDFYLISIAN

SEQ ID NO: 129815 - protein, 29 aa, Artificial Sequence
  Cyclic GFR-binding peptide
NAISMLYFNDKQQIILKKYREYVRKKPKL

SEQ ID NO: 129816 - protein, 29 aa, Artificial Sequence
  Cyclic GFR-binding peptide
NAISVLYFDSSNNVILKKYREYVRKKPKL

SEQ ID NO: 129817 - protein, 29 aa, Artificial Sequence
  Cyclic GFR-binding peptide
NAISILYFDKGVVTYLKKYREYVRKKPKL

SEQ ID NO: 129818 - protein, 29 aa, Artificial Sequence
  Cyclic GFR-binding peptide
NAISVLYFDDSSNVILKKYREYVRKKPKL

SEQ ID NO: 129819 - protein, 29 aa, Artificial Sequence
  Cyclic GFR-binding peptide
NAISMLYFDEYDKVVLKKYREYVRKKPKL

SEQ ID NO: 129820 - protein, 29 aa, Artificial Sequence
  Cyclic GFR-binding peptide
NAISMLYFDNGRVLLLKKYREYVRKKPKL

SEQ ID NO: 129821 - protein, 29 aa, Artificial Sequence
  Cyclic GFR-binding peptide
NAISMLYFDENEKVVLKKYREYVRKKPKL

SEQ ID NO: 129822 - protein, 29 aa, Artificial Sequence
  Cyclic GFR-binding peptide
NAISILYFDAANNVVLKKYREYVRKKPKL

SEQ ID NO: 129823 - protein, 29 aa, Artificial Sequence
  Cyclic GFR-binding peptide
NAISVLYFDDMGVPTLKKYREYVRKKPKL

SEQ ID NO: 129824 - protein, 29 aa, Artificial Sequence
  Cyclic GFR-binding peptide
NAISILYFDSANNVVLKKYREYVRKKPKL

SEQ ID NO: 129825 - protein, 29 aa, Artificial Sequence
  Cyclic GFR-binding peptide
EYVRKKPKLEYKFKVKPTRGVLYLISIPE

SEQ ID NO: 129826 - protein, 29 aa, Artificial Sequence
  Cyclic GFR-binding peptide
EYVRKKPKLYHYKLVVKDYEDKYLMSIPS

SEQ ID NO: 129827 - protein, 29 aa, Artificial Sequence
  Cyclic GFR-binding peptide
EYVRKKPKLEYKFKTPVGMDDLYLVSIPE

SEQ ID NO: 129828 - protein, 29 aa, Artificial Sequence
  Cyclic GFR-binding peptide
EYVRKKPKLRYKKLVVKDYEDFYLMSIAN

SEQ ID NO: 129829 - protein, 29 aa, Artificial Sequence
  Cyclic GFR-binding peptide
EYVRKKPKLRHKRLVKPKRGVYYLISTAS

SEQ ID NO: 129830 - protein, 29 aa, Artificial Sequence
  Cyclic GFR-binding peptide
EYVRKKPKLYHYKLVKPKRGVKYLISIPS

SEQ ID NO: 129831 - protein, 29 aa, Artificial Sequence
  Cyclic GFR-binding peptide
EYVRKKPKLEYKFKIKPTKGILYLISIPE

SEQ ID NO: 129832 - protein, 29 aa, Artificial Sequence
  Cyclic GFR-binding peptide
EYVRKKPKLEYKFKVVNKNEDLYLISIPE

SEQ ID NO: 129833 - protein, 29 aa, Artificial Sequence
  Cyclic GFR-binding peptide
EYVRKKPKLPIKGYVKPTRGVFYLINIPS

SEQ ID NO: 129834 - protein, 29 aa, Artificial Sequence
  Cyclic GFR-binding peptide
EYVRKKPKLPIKGYVVKENEDFYLMNIPS

SEQ ID NO: 129835 - protein, 29 aa, Artificial Sequence
  Cyclic GFR-binding peptide
EYVRKKPKLYHYKLYTVVGKDKYLISIPS

SEQ ID NO: 129836 - protein, 29 aa, Artificial Sequence
  Cyclic GFR-binding peptide
EYVRKKPKLEYKFKLLVRGNDLYLMSIPE

SEQ ID NO: 129837 - protein, 29 aa, Artificial Sequence
  Cyclic GFR-binding peptide
EYVRKKPKLRYKKLVKPKRGVFYLISIAN

SEQ ID NO: 129838 - protein, 29 aa, Artificial Sequence
  Cyclic GFR-binding peptide
EYVRKKPKLPIKGYTPVGMDDFYLVNIPS

SEQ ID NO: 129839 - protein, 29 aa, Artificial Sequence
  Cyclic GFR-binding peptide
EYVRKKPKLYHYKLVVNKNEDKYLISIPS

SEQ ID NO: 129840 - protein, 29 aa, Artificial Sequence
  Cyclic GFR-binding peptide
EYVRKKPKLYHYKLIVNSSDDKYLVSIPS

SEQ ID NO: 129841 - protein, 29 aa, Artificial Sequence
  Cyclic GFR-binding peptide
EYVRKKPKLPIKGYIVNSSDDFYLVNIPS

SEQ ID NO: 129842 - protein, 29 aa, Artificial Sequence
  Cyclic GFR-binding peptide
EYVRKKPKLRYKKLYTVVGKDFYLISIAN

SEQ ID NO: 129843 - protein, 29 aa, Artificial Sequence
  Cyclic GFR-binding peptide
EYVRKKPKLRHKRLLLVRGNDYYLMSTAS

SEQ ID NO: 129844 - protein, 29 aa, Artificial Sequence
  Cyclic GFR-binding peptide
EYVRKKPKLYHYKLLLVRGNDKYLMSIPS

SEQ ID NO: 129845 - protein, 29 aa, Artificial Sequence
  Cyclic GFR-binding peptide
EYVRKKPKLRYKKLIVNSSDDFYLVSIAN

SEQ ID NO: 129846 - protein, 29 aa, Artificial Sequence
  Cyclic GFR-binding peptide
EYVRKKPKLRHKRLVVNKNEDYYLISTAS

SEQ ID NO: 129847 - protein, 29 aa, Artificial Sequence
  Cyclic GFR-binding peptide
EYVRKKPKLRHKRLIKPTKGIYYLISTAS

SEQ ID NO: 129848 - protein, 29 aa, Artificial Sequence
  Cyclic GFR-binding peptide
EYVRKKPKLPIKGYYTVVGKDFYLINIPS

SEQ ID NO: 129849 - protein, 29 aa, Artificial Sequence
  Cyclic GFR-binding peptide
EYVRKKPKLYHYKLTPVGMDDKYLVSIPS

SEQ ID NO: 129850 - protein, 29 aa, Artificial Sequence
  Cyclic GFR-binding peptide
EYVRKKPKLRHKRLIVNNSSDYYLVSTAS

SEQ ID NO: 129851 - protein, 29 aa, Artificial Sequence
  Cyclic GFR-binding peptide
EYVRKKPKLRYKKLLLVRGNDFYLMSIAN

SEQ ID NO: 129852 - protein, 29 aa, Artificial Sequence
  Cyclic GFR-binding peptide
EYVRKKPKLYHYKLVKPTRGVKYLISIPS

SEQ ID NO: 129853 - protein, 29 aa, Artificial Sequence
  Cyclic GFR-binding peptide
EYVRKKPKLRHKRLIVNSSDDYYLVSTAS

SEQ ID NO: 129854 - protein, 29 aa, Artificial Sequence
  Cyclic GFR-binding peptide
EYVRKKPKLPIKGYLLVRGNDFYLMNIPS

SEQ ID NO: 129855 - protein, 29 aa, Artificial Sequence
  Cyclic GFR-binding peptide
EYVRKKPKLRYKKLVVNKNEDFYLISIAN

SEQ ID NO: 129856 - protein, 29 aa, Artificial Sequence
  Cyclic GFR-binding peptide
EYVRKKPKLEYKFKVVKDYEDLYLMSIPE

SEQ ID NO: 129857 - protein, 29 aa, Artificial Sequence
  Cyclic GFR-binding peptide
EYVRKKPKLPIKGYVVNKNEDFYLINIPS

SEQ ID NO: 129858 - protein, 29 aa, Artificial Sequence
  Cyclic GFR-binding peptide
EYVRKKPKLPIKGYIKPTKGIFYLINIPS

SEQ ID NO: 129859 - protein, 29 aa, Artificial Sequence
  Cyclic GFR-binding peptide
EYVRKKPKLEYKFKVVNNAADLYLISIPE

SEQ ID NO: 129860 - protein, 29 aa, Artificial Sequence
  Cyclic GFR-binding peptide
EYVRKKPKLRHKRLYTVVGKDYYLISTAS

SEQ ID NO: 129861 - protein, 29 aa, Artificial Sequence
  Cyclic GFR-binding peptide
EYVRKKPKLRYKKLIKPTKGIFYLISIAN

SEQ ID NO: 129862 - protein, 29 aa, Artificial Sequence
  Cyclic GFR-binding peptide
EYVRKKPKLPIKGYVVKDYEDFYLMNIPS

SEQ ID NO: 129863 - protein, 29 aa, Artificial Sequence
  Cyclic GFR-binding peptide
EYVRKKPKLEYKFKVVNNASDLYLISIPE

SEQ ID NO: 129864 - protein, 29 aa, Artificial Sequence
  Cyclic GFR-binding peptide
EYVRKKPKLRYKKLVKPTRGVFYLISIAN

SEQ ID NO: 129865 - protein, 29 aa, Artificial Sequence
  Cyclic GFR-binding peptide
EYVRKKPKLRHKRLVVKENEDYYLMSTAS

SEQ ID NO: 129866 - protein, 29 aa, Artificial Sequence
  Cyclic GFR-binding peptide
EYVRKKPKLYHYKLIKPTKGIKYLISIPS

SEQ ID NO: 129867 - protein, 29 aa, Artificial Sequence
  Cyclic GFR-binding peptide
EYVRKKPKLYHYKLVVKENEDKYLMSIPS

SEQ ID NO: 129868 - protein, 29 aa, Artificial Sequence
  Cyclic GFR-binding peptide
EYVRKKPKLRHKRLIIQQKDNYYLMSTAS

SEQ ID NO: 129869 - protein, 29 aa, Artificial Sequence
  Cyclic GFR-binding peptide
EYVRKKPKLRYKKLVVKENEDFYLMSIAN

SEQ ID NO: 129870 - protein, 29 aa, Artificial Sequence
  Cyclic GFR-binding peptide
EYVRKKPKLRYKKLVVNNAADFYLISIAN

SEQ ID NO: 129871 - protein, 29 aa, Artificial Sequence
  Cyclic GFR-binding peptide
EYVRKKPKLEYKFKIIQQKDNLYLMSIPE

SEQ ID NO: 129872 - protein, 29 aa, Artificial Sequence
  Cyclic GFR-binding peptide
EYVRKKPKLRYKKLTPVGMDDFYLVSIAN

SEQ ID NO: 129873 - protein, 29 aa, Artificial Sequence
  Cyclic GFR-binding peptide
EYVRKKPKLYHYKLVVNNAADKYLISIPS

SEQ ID NO: 129874 - protein, 29 aa, Artificial Sequence
  Cyclic GFR-binding peptide
EYVRKKPKLPIKGYIVNNSSDFYLVNIPS

SEQ ID NO: 129875 - protein, 29 aa, Artificial Sequence
  Cyclic GFR-binding peptide
EYVRKKPKLPIKGYVKPKRGVFYLINIPS

SEQ ID NO: 129876 - protein, 29 aa, Artificial Sequence
  Cyclic GFR-binding peptide
EYVRKKPKLRYKKLIIQQKDNFYLMSIAN

SEQ ID NO: 129877 - protein, 29 aa, Artificial Sequence
  Cyclic GFR-binding peptide
EYVRKKPKLPIKGYIIQQKDNFYLMNIPS

SEQ ID NO: 129878 - protein, 29 aa, Artificial Sequence
  Cyclic GFR-binding peptide
EYVRKKPKLRYKKLIVNNSSDFYLVSIAN

SEQ ID NO: 129879 - protein, 29 aa, Artificial Sequence
  Cyclic GFR-binding peptide
EYVRKKPKLPIKGYVVNNAADFYLINIPS

SEQ ID NO: 129880 - protein, 29 aa, Artificial Sequence
  Cyclic GFR-binding peptide
EYVRKKPKLRHKRLVKPTRGVYYLISTAS

SEQ ID NO: 129881 - protein, 29 aa, Artificial Sequence
  Cyclic GFR-binding peptide
EYVRKKPKLEYKFKIVNNSSDLYLVSIPE

SEQ ID NO: 129882 - protein, 29 aa, Artificial Sequence
  Cyclic GFR-binding peptide
EYVRKKPKLRHKRLVVNNASDYYLISTAS

SEQ ID NO: 129883 - protein, 29 aa, Artificial Sequence
  Cyclic GFR-binding peptide
EYVRKKPKLRHKRLTPVGMDDYYLVSTAS

SEQ ID NO: 129884 - protein, 29 aa, Artificial Sequence
  Cyclic GFR-binding peptide
EYVRKKPKLYHYKLIVNNSSDKYLVSIPS

SEQ ID NO: 129885 - protein, 29 aa, Artificial Sequence
  Cyclic GFR-binding peptide
EYVRKKPKLYHYKLVVNNASDKYLISIPS

SEQ ID NO: 129886 - protein, 29 aa, Artificial Sequence
  Cyclic GFR-binding peptide
EYVRKKPKLEYKFKIVNSSDDLYLVSIPE

SEQ ID NO: 129887 - protein, 29 aa, Artificial Sequence
  Cyclic GFR-binding peptide
EYVRKKPKLEYKFKVKPKRGVLYLISIPE

SEQ ID NO: 129888 - protein, 29 aa, Artificial Sequence
  Cyclic GFR-binding peptide
EYVRKKPKLRHKRLVVKDYEDYYLMSTAS

SEQ ID NO: 129889 - protein, 29 aa, Artificial Sequence
  Cyclic GFR-binding peptide
EYVRKKPKLEYKFKVVKENEDLYLMSIPE

SEQ ID NO: 129890 - protein, 29 aa, Artificial Sequence
  Cyclic GFR-binding peptide
EYVRKKPKLEYKFKYTVVGKDLYLISIPE

SEQ ID NO: 129891 - protein, 29 aa, Artificial Sequence
  Cyclic GFR-binding peptide
EYVRKKPKLPIKGYVVNNASDFYLINIPS

SEQ ID NO: 129892 - protein, 29 aa, Artificial Sequence
  Cyclic GFR-binding peptide
EYVRKKPKLYHYKLIIQQKDNKYLMSIPS

SEQ ID NO: 129893 - protein, 29 aa, Artificial Sequence
  Cyclic GFR-binding peptide
EYVRKKPKLRYKKLVVNNASDFYLISIAN

SEQ ID NO: 129894 - protein, 29 aa, Artificial Sequence
  Cyclic GFR-binding peptide
EYVRKKPKLRHKRLVVNNAADYYLISTAS

SEQ ID NO: 129895 - protein, 29 aa, Artificial Sequence
  Cyclic GFR-binding peptide
EPISILYLVGRTPKVKFKYEEYVRKKPKL

SEQ ID NO: 129896 - protein, 29 aa, Artificial Sequence
  Cyclic GFR-binding peptide
SPISMLYKDEYDKVVLKYHYEYVRKKPKL

SEQ ID NO: 129897 - protein, 29 aa, Artificial Sequence
  Cyclic GFR-binding peptide
EPISVLYLDDMGVPTKFKYEEYVRKKPKL

SEQ ID NO: 129898 - protein, 29 aa, Artificial Sequence
  Cyclic GFR-binding peptide
NAISMLYFDEYDKVVLKKYREYVRKKPKL

SEQ ID NO: 129899 - protein, 29 aa, Artificial Sequence
  Cyclic GFR-binding peptide
SATSILYYVGRKPKVLRKHREYVRKKPKL

SEQ ID NO: 129900 - protein, 29 aa, Artificial Sequence
  Cyclic GFR-binding peptide
SPISILYKVGRKPKVLKYHYEYVRKKPKL

SEQ ID NO: 129901 - protein, 29 aa, Artificial Sequence
  Cyclic GFR-binding peptide
EPISILYLIGKTPKIKFKYEEYVRKKPKL

SEQ ID NO: 129902 - protein, 29 aa, Artificial Sequence
  Cyclic GFR-binding peptide
EPISILYLDENKNVVKFKYEEYVRKKPKL

SEQ ID NO: 129903 - protein, 29 aa, Artificial Sequence
  Cyclic GFR-binding peptide
SPINILYFVGRTPKVYGKIPEYVRKKPKL

SEQ ID NO: 129904 - protein, 29 aa, Artificial Sequence
  Cyclic GFR-binding peptide
SPINMLYFDENEKVVYGKIPEYVRKKPKL

SEQ ID NO: 129905 - protein, 29 aa, Artificial Sequence
  Cyclic GFR-binding peptide
SPISILYKDKGVVTYLKYHYEYVRKKPKL

SEQ ID NO: 129906 - protein, 29 aa, Artificial Sequence
  Cyclic GFR-binding peptide
EPISMLYLDNGRVLLKFKYEEYVRKKPKL

SEQ ID NO: 129907 - protein, 29 aa, Artificial Sequence
  Cyclic GFR-binding peptide
NAISILYFVGRKPKVLKKYREYVRKKPKL

SEQ ID NO: 129908 - protein, 29 aa, Artificial Sequence
  Cyclic GFR-binding peptide
SPINVLYFDDMGVPTYGKIPEYVRKKPKL

SEQ ID NO: 129909 - protein, 29 aa, Artificial Sequence
  Cyclic GFR-binding peptide
SPISILYKDENKNVVLKYHYEYVRKKPKL

SEQ ID NO: 129910 - protein, 29 aa, Artificial Sequence
  Cyclic GFR-binding peptide
SPISVLYKDDSSNVILKYHYEYVRKKPKL

SEQ ID NO: 129911 - protein, 29 aa, Artificial Sequence
  Cyclic GFR-binding peptide
SPINVLYFDDSSNVIYGKIPEYVRKKPKL

SEQ ID NO: 129912 - protein, 29 aa, Artificial Sequence
  Cyclic GFR-binding peptide
NAISILYFDKGVVTYLKKYREYVRKKPKL

SEQ ID NO: 129913 - protein, 29 aa, Artificial Sequence
  Cyclic GFR-binding peptide
SATSMLYYDNGRVLLLRKHREYVRKKPKL

SEQ ID NO: 129914 - protein, 29 aa, Artificial Sequence
  Cyclic GFR-binding peptide
SPISMLYKDNGRVLLLKYHYEYVRKKPKL

SEQ ID NO: 129915 - protein, 29 aa, Artificial Sequence
  Cyclic GFR-binding peptide
NAISVLYFDDSSNVILKKYREYVRKKPKL

SEQ ID NO: 129916 - protein, 29 aa, Artificial Sequence
  Cyclic GFR-binding peptide
SATSILYYDENKNVVLRKHREYVRKKPKL

SEQ ID NO: 129917 - protein, 29 aa, Artificial Sequence
  Cyclic GFR-binding peptide
SATSILYYIGKTPKILRKHREYVRKKPKL

SEQ ID NO: 129918 - protein, 29 aa, Artificial Sequence
  Cyclic GFR-binding peptide
SPINILYFDKGVVTYYGKIPEYVRKKPKL

SEQ ID NO: 129919 - protein, 29 aa, Artificial Sequence
  Cyclic GFR-binding peptide
SPISVLYKDDMGVPTLKYHYEYVRKKPKL

SEQ ID NO: 129920 - protein, 29 aa, Artificial Sequence
  Cyclic GFR-binding peptide
SATSVLYYDSSNNVILRKHREYVRKKPKL

SEQ ID NO: 129921 - protein, 29 aa, Artificial Sequence
  Cyclic GFR-binding peptide
NAISMLYFDNGRVLLLKKYREYVRKKPKL

SEQ ID NO: 129922 - protein, 29 aa, Artificial Sequence
  Cyclic GFR-binding peptide
SPISILYKVGRTPKVLKYHYEYVRKKPKL

SEQ ID NO: 129923 - protein, 29 aa, Artificial Sequence
  Cyclic GFR-binding peptide
SATSVLYYDDSSNVILRKHREYVRKKPKL

SEQ ID NO: 129924 - protein, 29 aa, Artificial Sequence
  Cyclic GFR-binding peptide
SPINMLYFDNGRVLLYGKIPEYVRKKPKL

SEQ ID NO: 129925 - protein, 29 aa, Artificial Sequence
  Cyclic GFR-binding peptide
NAISILYFDENKNVVLKKYREYVRKKPKL

SEQ ID NO: 129926 - protein, 29 aa, Artificial Sequence
  Cyclic GFR-binding peptide
EPISMLYLDEYDKVVKFKYEEYVRKKPKL

SEQ ID NO: 129927 - protein, 29 aa, Artificial Sequence
  Cyclic GFR-binding peptide
SPINILYFDENKNVVYGKIPEYVRKKPKL

SEQ ID NO: 129928 - protein, 29 aa, Artificial Sequence
  Cyclic GFR-binding peptide
SPINILYFIGKTPKIYGKIPEYVRKKPKL

SEQ ID NO: 129929 - protein, 29 aa, Artificial Sequence
  Cyclic GFR-binding peptide
EPISILYLDAANNVVKFKYEEYVRKKPKL

SEQ ID NO: 129930 - protein, 29 aa, Artificial Sequence
  Cyclic GFR-binding peptide
SATSILYYDKGVVTYLRKHREYVRKKPKL

SEQ ID NO: 129931 - protein, 29 aa, Artificial Sequence
  Cyclic GFR-binding peptide
NAISILYFIGKTPKILKKYREYVRKKPKL

SEQ ID NO: 129932 - protein, 29 aa, Artificial Sequence
  Cyclic GFR-binding peptide
SPINMLYFDEYDKVVYGKIPEYVRKKPKL

SEQ ID NO: 129933 - protein, 29 aa, Artificial Sequence
  Cyclic GFR-binding peptide
EPISILYLDSANNVVKFKYEEYVRKKPKL

SEQ ID NO: 129934 - protein, 29 aa, Artificial Sequence
  Cyclic GFR-binding peptide
NAISILYFVGRTPKVLKKYREYVRKKPKL

SEQ ID NO: 129935 - protein, 29 aa, Artificial Sequence
  Cyclic GFR-binding peptide
SATSMLYYDENEKVVLRKHREYVRKKPKL

SEQ ID NO: 129936 - protein, 29 aa, Artificial Sequence
  Cyclic GFR-binding peptide
SPISILYKIGKTPKILKYHYEYVRKKPKL

SEQ ID NO: 129937 - protein, 29 aa, Artificial Sequence
  Cyclic GFR-binding peptide
SPISMLYKDENEKVVLKYHYEYVRKKPKL

SEQ ID NO: 129938 - protein, 29 aa, Artificial Sequence
  Cyclic GFR-binding peptide
SATSMLYYNDKQQIILRKHREYVRKKPKL

SEQ ID NO: 129939 - protein, 29 aa, Artificial Sequence
  Cyclic GFR-binding peptide
NAISMLYFDENEKVVLKKYREYVRKKPKL

SEQ ID NO: 129940 - protein, 29 aa, Artificial Sequence
  Cyclic GFR-binding peptide
NAISILYFDAANNVVLKKYREYVRKKPKL

SEQ ID NO: 129941 - protein, 29 aa, Artificial Sequence
  Cyclic GFR-binding peptide
EPISMLYLNDKQQIIKFKYEEYVRKKPKL

SEQ ID NO: 129942 - protein, 29 aa, Artificial Sequence
  Cyclic GFR-binding peptide
NAISVLYFDDMGVPTLKKYREYVRKKPKL

SEQ ID NO: 129943 - protein, 29 aa, Artificial Sequence
  Cyclic GFR-binding peptide
SPISILYKDAANNVVLKYHYEYVRKKPKL

SEQ ID NO: 129944 - protein, 29 aa, Artificial Sequence
  Cyclic GFR-binding peptide
SPINVLYFDSSNNVIYGKIPEYVRKKPKL

SEQ ID NO: 129945 - protein, 29 aa, Artificial Sequence
  Cyclic GFR-binding peptide
SPINILYFVGRKPKVYGKIPEYVRKKPKL

SEQ ID NO: 129946 - protein, 29 aa, Artificial Sequence
  Cyclic GFR-binding peptide
NAISMLYFNDKQQIILKKYREYVRKKPKL

SEQ ID NO: 129947 - protein, 29 aa, Artificial Sequence
  Cyclic GFR-binding peptide
SPINMLYFNDKQQIIYGKIPEYVRKKPKL

SEQ ID NO: 129948 - protein, 29 aa, Artificial Sequence
  Cyclic GFR-binding peptide
NAISVLYFDSSNNVILKKYREYVRKKPKL

SEQ ID NO: 129949 - protein, 29 aa, Artificial Sequence
  Cyclic GFR-binding peptide
SPINILYFDAANNVVYGKIPEYVRKKPKL

SEQ ID NO: 129950 - protein, 29 aa, Artificial Sequence
  Cyclic GFR-binding peptide
SATSILYYVGRTPKVLRKHREYVRKKPKL

SEQ ID NO: 129951 - protein, 29 aa, Artificial Sequence
  Cyclic GFR-binding peptide
EPISVLYLDSSNNVIKFKYEEYVRKKPKL

SEQ ID NO: 129952 - protein, 29 aa, Artificial Sequence
  Cyclic GFR-binding peptide
SATSILYYDSANNVVLRKHREYVRKKPKL

SEQ ID NO: 129953 - protein, 29 aa, Artificial Sequence
  Cyclic GFR-binding peptide
SATSVLYYDDMGVPTLRKHREYVRKKPKL

SEQ ID NO: 129954 - protein, 29 aa, Artificial Sequence
  Cyclic GFR-binding peptide
SPISVLYKDSSNNVILKYHYEYVRKKPKL

SEQ ID NO: 129955 - protein, 29 aa, Artificial Sequence
  Cyclic GFR-binding peptide
SPISILYKDSANNVVLKYHYEYVRKKPKL

SEQ ID NO: 129956 - protein, 29 aa, Artificial Sequence
  Cyclic GFR-binding peptide
EPISVLYLDDSSNVIKFKYEEYVRKKPKL

SEQ ID NO: 129957 - protein, 29 aa, Artificial Sequence
  Cyclic GFR-binding peptide
EPISILYLVGRKPKVKFKYEEYVRKKPKL

SEQ ID NO: 129958 - protein, 29 aa, Artificial Sequence
  Cyclic GFR-binding peptide
SATSMLYYDEYDKVVLRKHREYVRKKPKL

SEQ ID NO: 129959 - protein, 29 aa, Artificial Sequence
  Cyclic GFR-binding peptide
EPISMLYLDENEKVVKFKYEEYVRKKPKL

SEQ ID NO: 129960 - protein, 29 aa, Artificial Sequence
  Cyclic GFR-binding peptide
EPISILYLDKGVVTYKFKYEEYVRKKPKL

SEQ ID NO: 129961 - protein, 29 aa, Artificial Sequence
  Cyclic GFR-binding peptide
SPINILYFDSANNVVYGKIPEYVRKKPKL

SEQ ID NO: 129962 - protein, 29 aa, Artificial Sequence
  Cyclic GFR-binding peptide
SPISMLYKNDKQQIILKYHYEYVRKKPKL

SEQ ID NO: 129963 - protein, 29 aa, Artificial Sequence
  Cyclic GFR-binding peptide
NAISILYFDSANNVVLKKYREYVRKKPKL

SEQ ID NO: 129964 - protein, 29 aa, Artificial Sequence
  Cyclic GFR-binding peptide
SATSILYYDAANNVVLRKHREYVRKKPKL

SEQ ID NO: 129965 - protein, 29 aa, Artificial Sequence
  Cyclic GFR-binding peptide
EYVRKKPKLSMEGIIIQQKDNMIQMTINS

SEQ ID NO: 129966 - protein, 29 aa, Artificial Sequence
  Cyclic GFR-binding peptide
EYVRKKPKLSMEGIIVNSSDDMIQVTINS

SEQ ID NO: 129967 - protein, 29 aa, Artificial Sequence
  Cyclic GFR-binding peptide
EYVRKKPKLSMEGLVKPKRGVMIQITINS

SEQ ID NO: 129968 - protein, 29 aa, Artificial Sequence
  Cyclic GFR-binding peptide
EYVRKKPKLSMEGLVVNNASDMIQITINS

SEQ ID NO: 129969 - protein, 31 aa, Artificial Sequence; identical to SEQ ID NO: 129445
  Cyclic GFR-binding peptide

SEQ ID NO: 129970 - protein, 29 aa, Artificial Sequence
  Cyclic GFR-binding peptide
EYVRKKPKLSMEGILLVRGNDMIQMTINS

SEQ ID NO: 129971 - protein, 31 aa, Artificial Sequence; identical to SEQ ID NO: 129447
  Cyclic GFR-binding peptide

SEQ ID NO: 129972 - protein, 29 aa, Artificial Sequence
  Cyclic GFR-binding peptide
EYVRKKPKLSMEGLIKPTKGIMIQITINS

SEQ ID NO: 129973 - protein, 29 aa, Artificial Sequence
  Cyclic GFR-binding peptide
EYVRKKPKLSMEGLIVNSSDDMIQVTINS

SEQ ID NO: 129974 - protein, 31 aa, Artificial Sequence; identical to SEQ ID NO: 129450
  Cyclic GFR-binding peptide

SEQ ID NO: 129975 - protein, 29 aa, Artificial Sequence
  Cyclic GFR-binding peptide
EYVRKKPKLSMEGIVVNNASDMIQITINS

SEQ ID NO: 129976 - protein, 31 aa, Artificial Sequence; identical to SEQ ID NO: 129444
  Cyclic GFR-binding peptide

SEQ ID NO: 129977 - protein, 29 aa, Artificial Sequence
  Cyclic GFR-binding peptide
EYVRKKPKLSMEGIVKPKRGVMIQITINS

SEQ ID NO: 129978 - protein, 29 aa, Artificial Sequence
  Cyclic GFR-binding peptide
EYVRKKPKLSMEGIVKPTRGVMIQITINS

SEQ ID NO: 129979 - protein, 29 aa, Artificial Sequence
  Cyclic GFR-binding peptide
EYVRKKPKLSMEGLVVNNAADMIQITINS

SEQ ID NO: 129980 - protein, 29 aa, Artificial Sequence
  Cyclic GFR-binding peptide
EYVRKKPKLSMEGLLLVRGNDMIQMTINS

SEQ ID NO: 129981 - protein, 29 aa, Artificial Sequence
  Cyclic GFR-binding peptide
EYVRKKPKLSMEGIIKPTKGIMIQITINS

SEQ ID NO: 129982 - protein, 29 aa, Artificial Sequence
  Cyclic GFR-binding peptide
EYVRKKPKLSMEGLIIQQKDNMIQMTINS

SEQ ID NO: 129983 - protein, 31 aa, Artificial Sequence; identical to SEQ ID NO: 129446
  Cyclic GFR-binding peptide

SEQ ID NO: 129984 - protein, 29 aa, Artificial Sequence
  Cyclic GFR-binding peptide
EYVRKKPKLSMEGIVVNNAADMIQITINS

SEQ ID NO: 129985 - protein, 31 aa, Artificial Sequence; identical to SEQ ID NO: 129448
  Cyclic GFR-binding peptide

SEQ ID NO: 129986 - protein, 29 aa, Artificial Sequence
  Cyclic GFR-binding peptide
EYVRKKPKLSMEGLVKPTRGVMIQITINS

SEQ ID NO: 129987 - protein, 29 aa, Artificial Sequence
  Cyclic GFR-binding peptide
SNITMQIMNDKQQIIIGEMSEYVRKKPKL

SEQ ID NO: 129988 - protein, 29 aa, Artificial Sequence
  Cyclic GFR-binding peptide
SNITVQIMDDSSNVIIGEMSEYVRKKPKL

SEQ ID NO: 129989 - protein, 29 aa, Artificial Sequence
  Cyclic GFR-binding peptide
SNITIQIMVGRKPKVLGEMSEYVRKKPKL

SEQ ID NO: 129990 - protein, 29 aa, Artificial Sequence
  Cyclic GFR-binding peptide
SNITIQIMDSANNVVLGEMSEYVRKKPKL

SEQ ID NO: 129991 - protein, 31 aa, Artificial Sequence; identical to SEQ ID NO: 129457
  Cyclic GFR-binding peptide

SEQ ID NO: 129992 - protein, 29 aa, Artificial Sequence
  Cyclic GFR-binding peptide
SNITMQIMDNGRVLLIGEMSEYVRKKPKL

SEQ ID NO: 129993 - protein, 31 aa, Artificial Sequence; identical to SEQ ID NO: 129459
  Cyclic GFR-binding peptide

SEQ ID NO: 129994 - protein, 29 aa, Artificial Sequence
  Cyclic GFR-binding peptide
SNITIQIMIGKTPKILGEMSEYVRKKPKL

SEQ ID NO: 129995 - protein, 29 aa, Artificial Sequence
  Cyclic GFR-binding peptide
SNITVQIMDDSSNVILGEMSEYVRKKPKL

SEQ ID NO: 129996 - protein, 31 aa, Artificial Sequence; identical to SEQ ID NO: 129462
  Cyclic GFR-binding peptide

SEQ ID NO: 129997 - protein, 29 aa, Artificial Sequence
  Cyclic GFR-binding peptide
SNITIQIMDSANNVVIGEMSEYVRKKPKL

SEQ ID NO: 129998 - protein, 31 aa, Artificial Sequence; identical to SEQ ID NO: 129456
  Cyclic GFR-binding peptide

SEQ ID NO: 129999 - protein, 29 aa, Artificial Sequence
  Cyclic GFR-binding peptide
SNITIQIMVGRKPKVIGEMSEYVRKKPKL

SEQ ID NO: 130000 - protein, 29 aa, Artificial Sequence
  Cyclic GFR-binding peptide
SNITIQIMVGRTPKVIGEMSEYVRKKPKL

SEQ ID NO: 130001 - protein, 29 aa, Artificial Sequence
  Cyclic GFR-binding peptide
SNITIQIMDAANNVVLGEMSEYVRKKPKL

SEQ ID NO: 130002 - protein, 29 aa, Artificial Sequence
  Cyclic GFR-binding peptide
SNITMQIMDNGRVLLLGEMSEYVRKKPKL

SEQ ID NO: 130003 - protein, 29 aa, Artificial Sequence
  Cyclic GFR-binding peptide
SNITIQIMIGKTPKIIGEMSEYVRKKPKL

SEQ ID NO: 130004 - protein, 29 aa, Artificial Sequence
  Cyclic GFR-binding peptide
SNITMQIMNDKQQIILGEMSEYVRKKPKL

SEQ ID NO: 130005 - protein, 31 aa, Artificial Sequence; identical to SEQ ID NO: 129458
  Cyclic GFR-binding peptide

SEQ ID NO: 130006 - protein, 29 aa, Artificial Sequence
  Cyclic GFR-binding peptide
SNITIQIMDAANNVVIGEMSEYVRKKPKL

SEQ ID NO: 130007 - protein, 31 aa, Artificial Sequence; identical to SEQ ID NO: 129460
  Cyclic GFR-binding peptide

SEQ ID NO: 130008 - protein, 29 aa, Artificial Sequence
  Cyclic GFR-binding peptide
SNITIQIMVGRTPKVLGEMSEYVRKKPKL

SEQ ID NO: 130009 - protein, 29 aa, Artificial Sequence
  Cyclic GFR-binding peptide
EYVRKKPKLRYKKLIKPTKGIFYLISIAN

SEQ ID NO: 130010 - protein, 29 aa, Artificial Sequence
  Cyclic GFR-binding peptide
EYVRKKPKLQYNKLVVNKNEDLYLISIAS

SEQ ID NO: 130011 - protein, 29 aa, Artificial Sequence
  Cyclic GFR-binding peptide
EYVRKKPKLQYNKLVVNNAADLYLISIAS

SEQ ID NO: 130012 - protein, 29 aa, Artificial Sequence
  Cyclic GFR-binding peptide
EYVRKKPKLQYNKLIVNNSSDLYLVSIAS

SEQ ID NO: 130013 - protein, 29 aa, Artificial Sequence
  Cyclic GFR-binding peptide
EYVRKKPKLRYKKLVVKDYEDFYLMSIAN

SEQ ID NO: 130014 - protein, 29 aa, Artificial Sequence
  Cyclic GFR-binding peptide
EYVRKKPKLRYKKLVKPTRGVFYLISIAN

SEQ ID NO: 130015 - protein, 29 aa, Artificial Sequence
  Cyclic GFR-binding peptide
EYVRKKPKLQYNKLIIQQKDNLYLMSIAS

SEQ ID NO: 130016 - protein, 29 aa, Artificial Sequence
  Cyclic GFR-binding peptide
EYVRKKPKLQYNKLLLVRGNDLYLMSIAS

SEQ ID NO: 130017 - protein, 29 aa, Artificial Sequence
  Cyclic GFR-binding peptide
EYVRKKPKLQYNKLVKPTRGVLYLISIAS

SEQ ID NO: 130018 - protein, 29 aa, Artificial Sequence
  Cyclic GFR-binding peptide
EYVRKKPKLRYKKLVVKENEDFYLMSIAN

SEQ ID NO: 130019 - protein, 29 aa, Artificial Sequence
  Cyclic GFR-binding peptide
EYVRKKPKLRYKKLVVNNAADFYLISIAN

SEQ ID NO: 130020 - protein, 29 aa, Artificial Sequence
  Cyclic GFR-binding peptide
EYVRKKPKLQYNKLTPVGMDDLYLVSIAS

SEQ ID NO: 130021 - protein, 29 aa, Artificial Sequence
  Cyclic GFR-binding peptide
EYVRKKPKLRYKKLTPVGMDDFYLVSIAN

SEQ ID NO: 130022 - protein, 29 aa, Artificial Sequence
  Cyclic GFR-binding peptide
EYVRKKPKLRYKKLVKPKRGVFYLISIAN

SEQ ID NO: 130023 - protein, 29 aa, Artificial Sequence
  Cyclic GFR-binding peptide
EYVRKKPKLQYNKLVVKENEDLYLMSIAS

SEQ ID NO: 130024 - protein, 29 aa, Artificial Sequence
  Cyclic GFR-binding peptide
EYVRKKPKLRYKKLIIQQKDNFYLMSIAN

SEQ ID NO: 130025 - protein, 29 aa, Artificial Sequence
  Cyclic GFR-binding peptide
EYVRKKPKLQYNKLVKPKRGVLYLISIAS

SEQ ID NO: 130026 - protein, 29 aa, Artificial Sequence
  Cyclic GFR-binding peptide
EYVRKKPKLRYKKLIVNNSSDFYLVSIAN

SEQ ID NO: 130027 - protein, 29 aa, Artificial Sequence
  Cyclic GFR-binding peptide
EYVRKKPKLRYKKLYTVVGKDFYLISIAN

SEQ ID NO: 130028 - protein, 29 aa, Artificial Sequence
  Cyclic GFR-binding peptide
EYVRKKPKLRYKKLIVNSSDDFYLVSIAN

SEQ ID NO: 130029 - protein, 29 aa, Artificial Sequence
  Cyclic GFR-binding peptide
EYVRKKPKLRYKKLLLVRGNDFYLMSIAN

SEQ ID NO: 130030 - protein, 29 aa, Artificial Sequence
  Cyclic GFR-binding peptide
EYVRKKPKLQYNKLVVNNASDLYLISIAS

SEQ ID NO: 130031 - protein, 29 aa, Artificial Sequence
  Cyclic GFR-binding peptide
EYVRKKPKLQYNKLIKPTKGILYLISIAS

SEQ ID NO: 130032 - protein, 29 aa, Artificial Sequence
  Cyclic GFR-binding peptide
EYVRKKPKLRYKKLVVNKNEDFYLISIAN

SEQ ID NO: 130033 - protein, 29 aa, Artificial Sequence
  Cyclic GFR-binding peptide
EYVRKKPKLQYNKLYTVVGKDLYLISIAS

SEQ ID NO: 130034 - protein, 29 aa, Artificial Sequence
  Cyclic GFR-binding peptide
EYVRKKPKLQYNKLVVKDYEDLYLMSIAS

SEQ ID NO: 130035 - protein, 29 aa, Artificial Sequence
  Cyclic GFR-binding peptide
EYVRKKPKLRYKKLVVNNASDFYLISIAN

SEQ ID NO: 130036 - protein, 29 aa, Artificial Sequence
  Cyclic GFR-binding peptide
EYVRKKPKLQYNKLIVNSSDDLYLVSIAS

SEQ ID NO: 130037 - protein, 29 aa, Artificial Sequence
  Cyclic GFR-binding peptide
NAISILYFIGKTPKILKKYREYVRKKPKL

SEQ ID NO: 130038 - protein, 29 aa, Artificial Sequence
  Cyclic GFR-binding peptide
SAISILYLDENKNVVLKNYQEYVRKKPKL

SEQ ID NO: 130039 - protein, 29 aa, Artificial Sequence
  Cyclic GFR-binding peptide
SAISILYLDAANNVVLKNYQEYVRKKPKL

SEQ ID NO: 130040 - protein, 29 aa, Artificial Sequence
  Cyclic GFR-binding peptide
SAISVLYLDSSNNVILKNYQEYVRKKPKL

SEQ ID NO: 130041 - protein, 29 aa, Artificial Sequence
  Cyclic GFR-binding peptide
NAISMLYFDEYDKVVLKKYREYVRKKPKL

SEQ ID NO: 130042 - protein, 29 aa, Artificial Sequence
  Cyclic GFR-binding peptide
NAISILYFVGRTPKVLKKYREYVRKKPKL

SEQ ID NO: 130043 - protein, 29 aa, Artificial Sequence
  Cyclic GFR-binding peptide
SAISMLYLNDKQQIILKNYQEYVRKKPKL

SEQ ID NO: 130044 - protein, 29 aa, Artificial Sequence
  Cyclic GFR-binding peptide
SAISMLYLDNGRVLLLKNYQEYVRKKPKL

SEQ ID NO: 130045 - protein, 29 aa, Artificial Sequence
  Cyclic GFR-binding peptide
SAISILYLVGRTPKVLKNYQEYVRKKPKL

SEQ ID NO: 130046 - protein, 29 aa, Artificial Sequence
  Cyclic GFR-binding peptide
NAISMLYFDENEKVVLKKYREYVRKKPKL

SEQ ID NO: 130047 - protein, 29 aa, Artificial Sequence
  Cyclic GFR-binding peptide
NAISILYFDAANNVVLKKYREYVRKKPKL

SEQ ID NO: 130048 - protein, 29 aa, Artificial Sequence
  Cyclic GFR-binding peptide
SAISVLYLDDMGVPTLKNYQEYVRKKPKL

SEQ ID NO: 130049 - protein, 29 aa, Artificial Sequence
  Cyclic GFR-binding peptide
NAISVLYFDDMGVPTLKKYREYVRKKPKL

SEQ ID NO: 130050 - protein, 29 aa, Artificial Sequence
  Cyclic GFR-binding peptide
NAISILYFVGRKPKVLKKYREYVRKKPKL

SEQ ID NO: 130051 - protein, 29 aa, Artificial Sequence
  Cyclic GFR-binding peptide
SAISMLYLDENEKVVLKNYQEYVRKKPKL

SEQ ID NO: 130052 - protein, 29 aa, Artificial Sequence
  Cyclic GFR-binding peptide
NAISMLYFNDKQQIILKKYREYVRKKPKL

SEQ ID NO: 130053 - protein, 29 aa, Artificial Sequence
  Cyclic GFR-binding peptide
SAISILYLVGRKPKVLKNYQEYVRKKPKL

SEQ ID NO: 130054 - protein, 29 aa, Artificial Sequence
  Cyclic GFR-binding peptide
NAISVLYFDSSNNVILKKYREYVRKKPKL

SEQ ID NO: 130055 - protein, 29 aa, Artificial Sequence
  Cyclic GFR-binding peptide
NAISILYFDKGVVTYLKKYREYVRKKPKL

SEQ ID NO: 130056 - protein, 29 aa, Artificial Sequence
  Cyclic GFR-binding peptide
NAISVLYFDDSSNVILKKYREYVRKKPKL

SEQ ID NO: 130057 - protein, 29 aa, Artificial Sequence
  Cyclic GFR-binding peptide
NAISMLYFDNGRVLLLKKYREYVRKKPKL

SEQ ID NO: 130058 - protein, 29 aa, Artificial Sequence
  Cyclic GFR-binding peptide
SAISILYLDSANNVVLKNYQEYVRKKPKL

SEQ ID NO: 130059 - protein, 29 aa, Artificial Sequence
  Cyclic GFR-binding peptide
SAISILYLIGKTPKILKNYQEYVRKKPKL

SEQ ID NO: 130060 - protein, 29 aa, Artificial Sequence
  Cyclic GFR-binding peptide
NAISILYFDENKNVVLKKYREYVRKKPKL

SEQ ID NO: 130061 - protein, 29 aa, Artificial Sequence
  Cyclic GFR-binding peptide
SAISILYLDKGVVTYLKNYQEYVRKKPKL

SEQ ID NO: 130062 - protein, 29 aa, Artificial Sequence
  Cyclic GFR-binding peptide
SAISMLYLDEYDKVVLKNYQEYVRKKPKL

SEQ ID NO: 130063 - protein, 29 aa, Artificial Sequence
  Cyclic GFR-binding peptide
NAISILYFDSANNVVLKKYREYVRKKPKL

SEQ ID NO: 130064 - protein, 29 aa, Artificial Sequence
  Cyclic GFR-binding peptide
SAISVLYLDDSSNVILKNYQEYVRKKPKL

SEQ ID NO: 130065 - protein, 31 aa, Artificial Sequence; identical to SEQ ID NO: 129439
  Cyclic GFR-binding peptide

SEQ ID NO: 130066 - protein, 31 aa, Artificial Sequence; identical to SEQ ID NO: 129440
  Cyclic GFR-binding peptide

SEQ ID NO: 130067 - protein, 29 aa, Artificial Sequence
  Cyclic GFR-binding peptide
EYVRKKPKLVTAKKVKPTRGVIKRIQVPR

SEQ ID NO: 130068 - protein, 31 aa, Artificial Sequence; identical to SEQ ID NO: 129441
  Cyclic GFR-binding peptide

SEQ ID NO: 130069 - protein, 31 aa, Artificial Sequence; identical to SEQ ID NO: 129442
  Cyclic GFR-binding peptide

SEQ ID NO: 130070 - protein, 31 aa, Artificial Sequence; identical to SEQ ID NO: 129443
  Cyclic GFR-binding peptide

SEQ ID NO: 130071 - protein, 29 aa, Artificial Sequence
  Cyclic GFR-binding peptide
EYVRKKPKLVTAKKIKPTKGIIKRIQVPR

SEQ ID NO: 130072 - protein, 29 aa, Artificial Sequence
  Cyclic GFR-binding peptide
EYVRKKPKLVQVEKVKPKRGVVKAIKVSR

SEQ ID NO: 130073 - protein, 29 aa, Artificial Sequence
  Cyclic GFR-binding peptide
EYVRKKPKLVTAKKVKPKRGVIKRIQVPR

SEQ ID NO: 130074 - protein, 29 aa, Artificial Sequence
  Cyclic GFR-binding peptide
EYVRKKPKLVQVEKIKPTKGIVKAIKVSR

SEQ ID NO: 130075 - protein, 29 aa, Artificial Sequence
  Cyclic GFR-binding peptide
EYVRKKPKLVQVEKVKPTRGVVKAIKVSR

SEQ ID NO: 130076 - protein, 31 aa, Artificial Sequence; identical to SEQ ID NO: 129449
  Cyclic GFR-binding peptide

SEQ ID NO: 130077 - protein, 31 aa, Artificial Sequence; identical to SEQ ID NO: 129451
  Cyclic GFR-binding peptide

SEQ ID NO: 130078 - protein, 31 aa, Artificial Sequence; identical to SEQ ID NO: 129452
  Cyclic GFR-binding peptide

SEQ ID NO: 130079 - protein, 29 aa, Artificial Sequence
  Cyclic GFR-binding peptide
RPVQIRKIVGRTPKVKKATVEYVRKKPKL

SEQ ID NO: 130080 - protein, 31 aa, Artificial Sequence; identical to SEQ ID NO: 129453
  Cyclic GFR-binding peptide

SEQ ID NO: 130081 - protein, 31 aa, Artificial Sequence; identical to SEQ ID NO: 129454
  Cyclic GFR-binding peptide

SEQ ID NO: 130082 - protein, 31 aa, Artificial Sequence; identical to SEQ ID NO: 129455
  Cyclic GFR-binding peptide

SEQ ID NO: 130083 - protein, 29 aa, Artificial Sequence
  Cyclic GFR-binding peptide
RPVQIRKIIGKTPKIKKATVEYVRKKPKL

SEQ ID NO: 130084 - protein, 29 aa, Artificial Sequence
  Cyclic GFR-binding peptide
RSVKIAKVVGRKPKVKEVQVEYVRKKPKL

SEQ ID NO: 130085 - protein, 29 aa, Artificial Sequence
  Cyclic GFR-binding peptide
RPVQIRKIVGRKPKVKKATVEYVRKKPKL

SEQ ID NO: 130086 - protein, 29 aa, Artificial Sequence
  Cyclic GFR-binding peptide
RSVKIAKVIGKTPKIKEVQVEYVRKKPKL

SEQ ID NO: 130087 - protein, 29 aa, Artificial Sequence
  Cyclic GFR-binding peptide
RSVKIAKVVGRTPKVKEVQVEYVRKKPKL

SEQ ID NO: 130088 - protein, 31 aa, Artificial Sequence; identical to SEQ ID NO: 129461
  Cyclic GFR-binding peptide

SEQ ID NO: 130089 - protein, 29 aa, Artificial Sequence
  Cyclic GFR-binding peptide
EIVRKKPIFRYKKLIKPTKGIFYLISIAN

SEQ ID NO: 130090 - protein, 31 aa, Artificial Sequence
  Cyclic GFR-binding peptide
EIVRKKPIFRHKRLFIPKKRVIEYYLVSTAS

SEQ ID NO: 130091 - protein, 29 aa, Artificial Sequence
  Cyclic GFR-binding peptide
EIVRKKPIFYHYKLVVKDYEDKYLMSIPS

SEQ ID NO: 130092 - protein, 29 aa, Artificial Sequence
  Cyclic GFR-binding peptide
EIVRKKPIFQYNKLIVNNSSDLYLVSIAS

SEQ ID NO: 130093 - protein, 29 aa, Artificial Sequence
  Cyclic GFR-binding peptide
EIVRKKPIFRYKKLVVKDYEDFYLMSIAN

SEQ ID NO: 130094 - protein, 29 aa, Artificial Sequence
  Cyclic GFR-binding peptide
EIVRKKPIFRYKKLVKPTRGVFYLISIAN

SEQ ID NO: 130095 - protein, 29 aa, Artificial Sequence
  Cyclic GFR-binding peptide
EIVRKKPIFRHKRLVVKENEDYYLMSTAS

SEQ ID NO: 130096 - protein, 29 aa, Artificial Sequence
  Cyclic GFR-binding peptide
EIVRKKPIFYHYKLIKPTKGIKYLISIPS

SEQ ID NO: 130097 - protein, 31 aa, Artificial Sequence
  Cyclic GFR-binding peptide
EIVRKKPIFRYKKLFIPKKRVIEFYLVSIAN

SEQ ID NO: 130098 - protein, 29 aa, Artificial Sequence
  Cyclic GFR-binding peptide
EIVRKKPIFYHYKLVVKENEDKYLMSIPS

SEQ ID NO: 130099 - protein, 29 aa, Artificial Sequence
  Cyclic GFR-binding peptide
EIVRKKPIFRHKRLVKPKRGVYYLISTAS

SEQ ID NO: 130100 - protein, 29 aa, Artificial Sequence
  Cyclic GFR-binding peptide
EIVRKKPIFYHYKLVKPKRGVKYLISIPS

SEQ ID NO: 130101 - protein, 31 aa, Artificial Sequence
  Cyclic GFR-binding peptide
EIVRKKPIFQYNKLFIPKKRVIELYLVSIAS

SEQ ID NO: 130102 - protein, 29 aa, Artificial Sequence
  Cyclic GFR-binding peptide
EIVRKKPIFQYNKLVKPTRGVLYLISIAS

SEQ ID NO: 130103 - protein, 29 aa, Artificial Sequence
  Cyclic GFR-binding peptide
EIVRKKPIFRYKKLVVKENEDFYLMSIAN

SEQ ID NO: 130104 - protein, 29 aa, Artificial Sequence
  Cyclic GFR-binding peptide
EIVRKKPIFQYNKLTPVGMDDLYLVSIAS

SEQ ID NO: 130105 - protein, 29 aa, Artificial Sequence
  Cyclic GFR-binding peptide
EIVRKKPIFRYKKLTPVGMDDFYLVSIAN

SEQ ID NO: 130106 - protein, 29 aa, Artificial Sequence
  Cyclic GFR-binding peptide
EIVRKKPIFRYKKLVKPKRGVFYLISIAN

SEQ ID NO: 130107 - protein, 29 aa, Artificial Sequence
  Cyclic GFR-binding peptide
EIVRKKPIFQYNKLVVKENEDLYLMSIAS

SEQ ID NO: 130108 - protein, 29 aa, Artificial Sequence
  Cyclic GFR-binding peptide
EIVRKKPIFYHYKLIVNSSDDKYLVSIPS

SEQ ID NO: 130109 - protein, 29 aa, Artificial Sequence
  Cyclic GFR-binding peptide
EIVRKKPIFQYNKLVKPKRGVLYLISIAS

SEQ ID NO: 130110 - protein, 29 aa, Artificial Sequence
  Cyclic GFR-binding peptide
EIVRKKPIFRYKKLIVNNSSDFYLVSIAN

SEQ ID NO: 130111 - protein, 29 aa, Artificial Sequence
  Cyclic GFR-binding peptide
EIVRKKPIFRYKKLIVNSSDDFYLVSIAN

SEQ ID NO: 130112 - protein, 29 aa, Artificial Sequence
  Cyclic GFR-binding peptide
EIVRKKPIFRHKRLVKPTRGVYYLISTAS

SEQ ID NO: 130113 - protein, 31 aa, Artificial Sequence
  Cyclic GFR-binding peptide
EIVRKKPIFYHYKLFIPKKRVIEKYLVSIPS

SEQ ID NO: 130114 - protein, 29 aa, Artificial Sequence
  Cyclic GFR-binding peptide
EIVRKKPIFRHKRLIKPTKGIYYLISTAS

SEQ ID NO: 130115 - protein, 29 aa, Artificial Sequence
  Cyclic GFR-binding peptide
EIVRKKPIFRHKRLTPVGMDDYYLVSTAS

SEQ ID NO: 130116 - protein, 29 aa, Artificial Sequence
  Cyclic GFR-binding peptide
EIVRKKPIFYHYKLTPVGMDDKYLVSIPS

SEQ ID NO: 130117 - protein, 29 aa, Artificial Sequence
  Cyclic GFR-binding peptide
EIVRKKPIFYHYKLIVNNSSDKYLVSIPS

SEQ ID NO: 130118 - protein, 29 aa, Artificial Sequence
  Cyclic GFR-binding peptide
EIVRKKPIFRHKRLIVNNSSDYYLVSTAS

SEQ ID NO: 130119 - protein, 29 aa, Artificial Sequence
  Cyclic GFR-binding peptide
EIVRKKPIFYHYKLVKPTRGVKYLISIPS

SEQ ID NO: 130120 - protein, 29 aa, Artificial Sequence
  Cyclic GFR-binding peptide
EIVRKKPIFRHKRLIVNSSDDYYLVSTAS

SEQ ID NO: 130121 - protein, 29 aa, Artificial Sequence
  Cyclic GFR-binding peptide
EIVRKKPIFRHKRLVVKDYEDYYLMSTAS

SEQ ID NO: 130122 - protein, 29 aa, Artificial Sequence
  Cyclic GFR-binding peptide
EIVRKKPIFQYNKLIKPTKGILYLISIAS

SEQ ID NO: 130123 - protein, 29 aa, Artificial Sequence
  Cyclic GFR-binding peptide
EIVRKKPIFQYNKLVVKDYEDLYLMSIAS

SEQ ID NO: 130124 - protein, 29 aa, Artificial Sequence
  Cyclic GFR-binding peptide
EIVRKKPIFQYNKLIVNSSDDLYLVSIAS

SEQ ID NO: 130125 - protein, 29 aa, Artificial Sequence
  Cyclic GFR-binding peptide
NAISILYFIGKTPKILKKYREIVRKKPIF

SEQ ID NO: 130126 - protein, 31 aa, Artificial Sequence
  Cyclic GFR-binding peptide
SATSVLYYEIVRKKPIFLRKHREIVRKKPIF

SEQ ID NO: 130127 - protein, 29 aa, Artificial Sequence
  Cyclic GFR-binding peptide
SPISMLYKDEYDKVVLKYHYEIVRKKPIF

SEQ ID NO: 130128 - protein, 29 aa, Artificial Sequence
  Cyclic GFR-binding peptide
SAISVLYLDSSNNVILKNYQEIVRKKPIF

SEQ ID NO: 130129 - protein, 29 aa, Artificial Sequence
  Cyclic GFR-binding peptide
NAISMLYFDEYDKVVLKKYREIVRKKPIF

SEQ ID NO: 130130 - protein, 29 aa, Artificial Sequence
  Cyclic GFR-binding peptide
NAISILYFVGRTPKVLKKYREIVRKKPIF

SEQ ID NO: 130131 - protein, 29 aa, Artificial Sequence
  Cyclic GFR-binding peptide
SATSMLYYDENEKVVLRKHREIVRKKPIF

SEQ ID NO: 130132 - protein, 29 aa, Artificial Sequence
  Cyclic GFR-binding peptide
SPISILYKIGKTPKILKYHYEIVRKKPIF

SEQ ID NO: 130133 - protein, 31 aa, Artificial Sequence
  Cyclic GFR-binding peptide
NAISVLYFEIVRKKPIFLKKYREIVRKKPIF

SEQ ID NO: 130134 - protein, 29 aa, Artificial Sequence
  Cyclic GFR-binding peptide
SPISMLYKDENEKVVLKYHYEIVRKKPIF

SEQ ID NO: 130135 - protein, 29 aa, Artificial Sequence
  Cyclic GFR-binding peptide
SATSILYYVGRKPKVLRKHREIVRKKPIF

SEQ ID NO: 130136 - protein, 29 aa, Artificial Sequence
  Cyclic GFR-binding peptide
SPISILYKVGRKPKVLKYHYEIVRKKPIF

SEQ ID NO: 130137 - protein, 31 aa, Artificial Sequence; identical to SEQ ID NO: 8394
  Cyclic GFR-binding peptide

SEQ ID NO: 130138 - protein, 29 aa, Artificial Sequence
  Cyclic GFR-binding peptide
SAISILYLVGRTPKVLKNYQEIVRKKPIF

SEQ ID NO: 130139 - protein, 29 aa, Artificial Sequence
  Cyclic GFR-binding peptide
NAISMLYFDENEKVVLKKYREIVRKKPIF

SEQ ID NO: 130140 - protein, 29 aa, Artificial Sequence
  Cyclic GFR-binding peptide
SAISVLYLDDMGVPTLKNYQEIVRKKPIF

SEQ ID NO: 130141 - protein, 29 aa, Artificial Sequence
  Cyclic GFR-binding peptide
NAISVLYFDDMGVPTLKKYREIVRKKPIF

SEQ ID NO: 130142 - protein, 29 aa, Artificial Sequence
  Cyclic GFR-binding peptide
NAISILYFVGRKPKVLKKYREIVRKKPIF

SEQ ID NO: 130143 - protein, 29 aa, Artificial Sequence
  Cyclic GFR-binding peptide
SAISMLYLDENEKVVLKNYQEIVRKKPIF

SEQ ID NO: 130144 - protein, 29 aa, Artificial Sequence
  Cyclic GFR-binding peptide
SPISVLYKDDSSNVILKYHYEIVRKKPIF

SEQ ID NO: 130145 - protein, 29 aa, Artificial Sequence
  Cyclic GFR-binding peptide
SAISILYLVGRKPKVLKNYQEIVRKKPIF

SEQ ID NO: 130146 - protein, 29 aa, Artificial Sequence
  Cyclic GFR-binding peptide
NAISVLYFDSSNNVILKKYREIVRKKPIF

SEQ ID NO: 130147 - protein, 29 aa, Artificial Sequence
  Cyclic GFR-binding peptide
NAISVLYFDDSSNVILKKYREIVRKKPIF

SEQ ID NO: 130148 - protein, 29 aa, Artificial Sequence
  Cyclic GFR-binding peptide
SATSILYYVGRTPKVLRKHREIVRKKPIF

SEQ ID NO: 130149 - protein, 31 aa, Artificial Sequence
  Cyclic GFR-binding peptide
SPISVLYKEIVRKKPIFLKYHYEIVRKKPIF

SEQ ID NO: 130150 - protein, 29 aa, Artificial Sequence
  Cyclic GFR-binding peptide
SATSILYYIGKTPKILRKHREIVRKKPIF

SEQ ID NO: 130151 - protein, 29 aa, Artificial Sequence
  Cyclic GFR-binding peptide
SATSVLYYDDMGVPTLRKHREIVRKKPIF

SEQ ID NO: 130152 - protein, 29 aa, Artificial Sequence
  Cyclic GFR-binding peptide
SPISVLYKDDMGVPTLKYHYEIVRKKPIF

SEQ ID NO: 130153 - protein, 29 aa, Artificial Sequence
  Cyclic GFR-binding peptide
SPISVLYKDSSNNVILKYHYEIVRKKPIF

SEQ ID NO: 130154 - protein, 29 aa, Artificial Sequence
  Cyclic GFR-binding peptide
SATSVLYYDSSNNVILRKHREIVRKKPIF

SEQ ID NO: 130155 - protein, 29 aa, Artificial Sequence
  Cyclic GFR-binding peptide
SPISILYKVGRTPKVLKYHYEIVRKKPIF

SEQ ID NO: 130156 - protein, 29 aa, Artificial Sequence
  Cyclic GFR-binding peptide
SATSVLYYDDSSNVILRKHREIVRKKPIF

SEQ ID NO: 130157 - protein, 29 aa, Artificial Sequence
  Cyclic GFR-binding peptide
SATSMLYYDEYDKVVLRKHREIVRKKPIF

SEQ ID NO: 130158 - protein, 29 aa, Artificial Sequence
  Cyclic GFR-binding peptide
SAISILYLIGKTPKILKNYQEIVRKKPIF

SEQ ID NO: 130159 - protein, 29 aa, Artificial Sequence
  Cyclic GFR-binding peptide
SAISMLYLDEYDKVVLKNYQEIVRKKPIF

SEQ ID NO: 130160 - protein, 29 aa, Artificial Sequence
  Cyclic GFR-binding peptide
SAISVLYLDDSSNVILKNYQEIVRKKPIF

SEQ ID NO: 130161 - protein, 29 aa, Artificial Sequence
  Cyclic GFR-binding peptide
EIVRKKPIFRYKKLIKPTKGIFYLISIAN

SEQ ID NO: 130162 - protein, 29 aa, Artificial Sequence
  Cyclic GFR-binding peptide
EIVRKKPIFNSLQEVVKDYEDYYLMTLPE

SEQ ID NO: 130163 - protein, 29 aa, Artificial Sequence
  Cyclic GFR-binding peptide
EIVRKKPIFNSLQEIKPTKGIYYVIPLPE

SEQ ID NO: 130164 - protein, 29 aa, Artificial Sequence
  Cyclic GFR-binding peptide
EIVRKKPIFNSLQEVKPKRGVYYLITLPE

SEQ ID NO: 130165 - protein, 29 aa, Artificial Sequence
  Cyclic GFR-binding peptide
EIVRKKPIFNSLQEVKPTRGVYYVIPLPE

SEQ ID NO: 130166 - protein, 29 aa, Artificial Sequence
  Cyclic GFR-binding peptide
EIVRKKPIFRYKKLVVKDYEDFYLMSIAN

SEQ ID NO: 130167 - protein, 29 aa, Artificial Sequence
  Cyclic GFR-binding peptide
EIVRKKPIFEYQKYIVNSSDDIFLVSIPS

SEQ ID NO: 130168 - protein, 29 aa, Artificial Sequence
  Cyclic GFR-binding peptide
EIVRKKPIFEYQKYVKPTRGVIFLISIPS

SEQ ID NO: 130169 - protein, 29 aa, Artificial Sequence
  Cyclic GFR-binding peptide
EIVRKKPIFNSLQEVVKENEDYYLMTLPE

SEQ ID NO: 130170 - protein, 29 aa, Artificial Sequence
  Cyclic GFR-binding peptide
EIVRKKPIFRYKKLVKPTRGVFYLISIAN

SEQ ID NO: 130171 - protein, 29 aa, Artificial Sequence
  Cyclic GFR-binding peptide
EIVRKKPIFNSLQEVVNNASDYYLITLPE

SEQ ID NO: 130172 - protein, 29 aa, Artificial Sequence
  Cyclic GFR-binding peptide
EIVRKKPIFNSLQEVKPKRGVYYVIPLPE

SEQ ID NO: 130173 - protein, 29 aa, Artificial Sequence
  Cyclic GFR-binding peptide
EIVRKKPIFNSLQEVVNNASDYYVIPLPE

SEQ ID NO: 130174 - protein, 29 aa, Artificial Sequence
  Cyclic GFR-binding peptide
EIVRKKPIFNSLQEVKPTRGVYYLITLPE

SEQ ID NO: 130175 - protein, 29 aa, Artificial Sequence
  Cyclic GFR-binding peptide
EIVRKKPIFQYNKLVKPTRGVLYLISIAS

SEQ ID NO: 130176 - protein, 29 aa, Artificial Sequence
  Cyclic GFR-binding peptide
EIVRKKPIFRYKKLVVKENEDFYLMSIAN

SEQ ID NO: 130177 - protein, 29 aa, Artificial Sequence
  Cyclic GFR-binding peptide
EIVRKKPIFEYQKYIKPTKGIIFLISIPS

SEQ ID NO: 130178 - protein, 29 aa, Artificial Sequence
  Cyclic GFR-binding peptide
EIVRKKPIFEYQKYVVNNASDIFLISIPS

SEQ ID NO: 130179 - protein, 29 aa, Artificial Sequence
  Cyclic GFR-binding peptide
EIVRKKPIFRYKKLVKPKRGVFYLISIAN

SEQ ID NO: 130180 - protein, 29 aa, Artificial Sequence
  Cyclic GFR-binding peptide
EIVRKKPIFNSLQEIVNSSDDYYVVPLPE

SEQ ID NO: 130181 - protein, 29 aa, Artificial Sequence
  Cyclic GFR-binding peptide
EIVRKKPIFNSLQEVVKDYEDYYVMPLPE

SEQ ID NO: 130182 - protein, 29 aa, Artificial Sequence
  Cyclic GFR-binding peptide
EIVRKKPIFQYNKLVVKENEDLYLMSIAS

SEQ ID NO: 130183 - protein, 29 aa, Artificial Sequence
  Cyclic GFR-binding peptide
EIVRKKPIFEYQKYVVKENEDIFLMSIPS

SEQ ID NO: 130184 - protein, 29 aa, Artificial Sequence
  Cyclic GFR-binding peptide
EIVRKKPIFQYNKLVKPKRGVLYLISIAS

SEQ ID NO: 130185 - protein, 29 aa, Artificial Sequence
  Cyclic GFR-binding peptide
EIVRKKPIFRYKKLIVNSSDDFYLVSIAN

SEQ ID NO: 130186 - protein, 29 aa, Artificial Sequence
  Cyclic GFR-binding peptide
EIVRKKPIFNSLQEVVKENEDYYVMPLPE

SEQ ID NO: 130187 - protein, 29 aa, Artificial Sequence
  Cyclic GFR-binding peptide
EIVRKKPIFEYQKYVVKDYEDIFLMSIPS

SEQ ID NO: 130188 - protein, 29 aa, Artificial Sequence
  Cyclic GFR-binding peptide
EIVRKKPIFQYNKLVVNNASDLYLISIAS

SEQ ID NO: 130189 - protein, 29 aa, Artificial Sequence
  Cyclic GFR-binding peptide
EIVRKKPIFQYNKLIKPTKGILYLISIAS

SEQ ID NO: 130190 - protein, 29 aa, Artificial Sequence
  Cyclic GFR-binding peptide
EIVRKKPIFNSLQEIKPTKGIYYLITLPE

SEQ ID NO: 130191 - protein, 29 aa, Artificial Sequence
  Cyclic GFR-binding peptide
EIVRKKPIFEYQKYVKPKRGVIFLISIPS

SEQ ID NO: 130192 - protein, 29 aa, Artificial Sequence
  Cyclic GFR-binding peptide
EIVRKKPIFQYNKLVVKDYEDLYLMSIAS

SEQ ID NO: 130193 - protein, 29 aa, Artificial Sequence
  Cyclic GFR-binding peptide
EIVRKKPIFRYKKLVVNNASDFYLISIAN

SEQ ID NO: 130194 - protein, 29 aa, Artificial Sequence
  Cyclic GFR-binding peptide
EIVRKKPIFNSLQEIVNSSDDYYLVTLPE

SEQ ID NO: 130195 - protein, 29 aa, Artificial Sequence
  Cyclic GFR-binding peptide
EIVRKKPIFQYNKLIVNSSDDLYLVSIAS

SEQ ID NO: 130196 - protein, 29 aa, Artificial Sequence
  Cyclic GFR-binding peptide
NAISILYFIGKTPKILKKYREIVRKKPIF

SEQ ID NO: 130197 - protein, 29 aa, Artificial Sequence
  Cyclic GFR-binding peptide
EPLTMLYYDEYDKVVEQLSNEIVRKKPIF

SEQ ID NO: 130198 - protein, 29 aa, Artificial Sequence
  Cyclic GFR-binding peptide
EPLPIVYYIGKTPKIEQLSNEIVRKKPIF

SEQ ID NO: 130199 - protein, 29 aa, Artificial Sequence
  Cyclic GFR-binding peptide
EPLTILYYVGRKPKVEQLSNEIVRKKPIF

SEQ ID NO: 130200 - protein, 29 aa, Artificial Sequence
  Cyclic GFR-binding peptide
EPLPIVYYVGRTPKVEQLSNEIVRKKPIF

SEQ ID NO: 130201 - protein, 29 aa, Artificial Sequence
  Cyclic GFR-binding peptide
NAISMLYFDEYDKVVLKKYREIVRKKPIF

SEQ ID NO: 130202 - protein, 29 aa, Artificial Sequence
  Cyclic GFR-binding peptide
SPISVLFIDDSSNVIYKQYEEIVRKKPIF

SEQ ID NO: 130203 - protein, 29 aa, Artificial Sequence
  Cyclic GFR-binding peptide
SPISILFIVGRTPKVYKQYEEIVRKKPIF

SEQ ID NO: 130204 - protein, 29 aa, Artificial Sequence
  Cyclic GFR-binding peptide
EPLTMLYYDENEKVVEQLSNEIVRKKPIF

SEQ ID NO: 130205 - protein, 29 aa, Artificial Sequence
  Cyclic GFR-binding peptide
NAISILYFVGRTPKVLKKYREIVRKKPIF

SEQ ID NO: 130206 - protein, 29 aa, Artificial Sequence
  Cyclic GFR-binding peptide
EPLTILYYDSANNVVEQLSNEIVRKKPIF

SEQ ID NO: 130207 - protein, 29 aa, Artificial Sequence
  Cyclic GFR-binding peptide
EPLPIVYYVGRKPKVEQLSNEIVRKKPIF

SEQ ID NO: 130208 - protein, 29 aa, Artificial Sequence
  Cyclic GFR-binding peptide
EPLPIVYYDSANNVVEQLSNEIVRKKPIF

SEQ ID NO: 130209 - protein, 29 aa, Artificial Sequence
  Cyclic GFR-binding peptide
EPLTILYYVGRTPKVEQLSNEIVRKKPIF

SEQ ID NO: 130210 - protein, 29 aa, Artificial Sequence
  Cyclic GFR-binding peptide
SAISILYLVGRTPKVLKNYQEIVRKKPIF

SEQ ID NO: 130211 - protein, 29 aa, Artificial Sequence
  Cyclic GFR-binding peptide
NAISMLYFDENEKVVLKKYREIVRKKPIF

SEQ ID NO: 130212 - protein, 29 aa, Artificial Sequence
  Cyclic GFR-binding peptide
SPISILFIIGKTPKIYKQYEEIVRKKPIF

SEQ ID NO: 130213 - protein, 29 aa, Artificial Sequence
  Cyclic GFR-binding peptide
SPISILFIDSANNVVYKQYEEIVRKKPIF

SEQ ID NO: 130214 - protein, 29 aa, Artificial Sequence
  Cyclic GFR-binding peptide
NAISILYFVGRKPKVLKKYREIVRKKPIF

SEQ ID NO: 130215 - protein, 29 aa, Artificial Sequence
  Cyclic GFR-binding peptide
EPLPVVYYDDSSNVIEQLSNEIVRKKPIF

SEQ ID NO: 130216 - protein, 29 aa, Artificial Sequence
  Cyclic GFR-binding peptide
EPLPMVYYDEYDKVVEQLSNEIVRKKPIF

SEQ ID NO: 130217 - protein, 29 aa, Artificial Sequence
  Cyclic GFR-binding peptide
SAISMLYLDENEKVVLKNYQEIVRKKPIF

SEQ ID NO: 130218 - protein, 29 aa, Artificial Sequence
  Cyclic GFR-binding peptide
SPISMLFIDENEKVVYKQYEEIVRKKPIF

SEQ ID NO: 130219 - protein, 29 aa, Artificial Sequence
  Cyclic GFR-binding peptide
SAISILYLVGRKPKVLKNYQEIVRKKPIF

SEQ ID NO: 130220 - protein, 29 aa, Artificial Sequence
  Cyclic GFR-binding peptide
NAISVLYFDDSSNVILKKYREIVRKKPIF

SEQ ID NO: 130221 - protein, 29 aa, Artificial Sequence
  Cyclic GFR-binding peptide
EPLPMVYYDENEKVVEQLSNEIVRKKPIF

SEQ ID NO: 130222 - protein, 29 aa, Artificial Sequence
  Cyclic GFR-binding peptide
SPISMLFIDEYDKVVYKQYEEIVRKKPIF

SEQ ID NO: 130223 - protein, 29 aa, Artificial Sequence
  Cyclic GFR-binding peptide
SAISILYLDSANNVVLKNYQEIVRKKPIF

SEQ ID NO: 130224 - protein, 29 aa, Artificial Sequence
  Cyclic GFR-binding peptide
SAISILYLIGKTPKILKNYQEIVRKKPIF

SEQ ID NO: 130225 - protein, 29 aa, Artificial Sequence
  Cyclic GFR-binding peptide
EPLTILYYIGKTPKIEQLSNEIVRKKPIF

SEQ ID NO: 130226 - protein, 29 aa, Artificial Sequence
  Cyclic GFR-binding peptide
SPISILFIVGRKPKVYKQYEEIVRKKPIF

SEQ ID NO: 130227 - protein, 29 aa, Artificial Sequence
  Cyclic GFR-binding peptide
SAISMLYLDEYDKVVLKNYQEIVRKKPIF

SEQ ID NO: 130228 - protein, 29 aa, Artificial Sequence
  Cyclic GFR-binding peptide
NAISILYFDSANNVVLKKYREIVRKKPIF

SEQ ID NO: 130229 - protein, 29 aa, Artificial Sequence
  Cyclic GFR-binding peptide
EPLTVLYYDDSSNVIEQLSNEIVRKKPIF

SEQ ID NO: 130230 - protein, 29 aa, Artificial Sequence
  Cyclic GFR-binding peptide
SAISVLYLDDSSNVILKNYQEIVRKKPIF

SEQ ID NO: 130231 - protein, 31 aa, Artificial Sequence
  Cyclic GFR-binding peptide
EIVRKKPIFVTAKKLKPKKRVYEIKRVQVPR

SEQ ID NO: 130232 - protein, 31 aa, Artificial Sequence
  Cyclic GFR-binding peptide
EIVRKKPIFVQVEKLKPKKRVYEVKAVKVSR

SEQ ID NO: 130233 - protein, 31 aa, Artificial Sequence
  Cyclic GFR-binding peptide
EIVRKKPIFVQVEKFIPKKRVIEVKAVKVSR

SEQ ID NO: 130234 - protein, 31 aa, Artificial Sequence
  Cyclic GFR-binding peptide
EIVRKKPIFVQVEKHQGQHPKIRVKAMKVSR

SEQ ID NO: 130235 - protein, 31 aa, Artificial Sequence
  Cyclic GFR-binding peptide
EIVRKKPIFVTAKKHQGQHPKIRIKRMQVPR

SEQ ID NO: 130236 - protein, 31 aa, Artificial Sequence
  Cyclic GFR-binding peptide
EIVRKKPIFSMEGLLKPKKRVYEMIQVTINS

SEQ ID NO: 130237 - protein, 31 aa, Artificial Sequence
  Cyclic GFR-binding peptide
EIVRKKPIFSMEGIFIPKKRVIEMIQVTINS

SEQ ID NO: 130238 - protein, 31 aa, Artificial Sequence
  Cyclic GFR-binding peptide
EIVRKKPIFSMEGLHQGQHPKIRMIQMTINS

SEQ ID NO: 130239 - protein, 31 aa, Artificial Sequence
  Cyclic GFR-binding peptide
EIVRKKPIFSMEGILKPKKRVYEMIQVTINS

SEQ ID NO: 130240 - protein, 31 aa, Artificial Sequence
  Cyclic GFR-binding peptide
EIVRKKPIFSMEGLFIPKKRVIEMIQVTINS

SEQ ID NO: 130241 - protein, 31 aa, Artificial Sequence
  Cyclic GFR-binding peptide
EIVRKKPIFVTAKKFIPKKRVIEIKRVQVPR

SEQ ID NO: 130242 - protein, 31 aa, Artificial Sequence
  Cyclic GFR-binding peptide
EIVRKKPIFSMEGIHQGQHPKIRMIQMTINS

SEQ ID NO: 130243 - protein, 31 aa, Artificial Sequence
  Cyclic GFR-binding peptide
RPVQVRKIEYVRKKPKLKKATVEIVRKKPIF

SEQ ID NO: 130244 - protein, 31 aa, Artificial Sequence
  Cyclic GFR-binding peptide
RSVKVAKVEYVRKKPKLKEVQVEIVRKKPIF

SEQ ID NO: 130245 - protein, 31 aa, Artificial Sequence
  Cyclic GFR-binding peptide
RSVKVAKVEIVRKKPIFKEVQVEIVRKKPIF

SEQ ID NO: 130246 - protein, 31 aa, Artificial Sequence
  Cyclic GFR-binding peptide
RSVKMAKVRIKPHQGQHKEVQVEIVRKKPIF

SEQ ID NO: 130247 - protein, 31 aa, Artificial Sequence
  Cyclic GFR-binding peptide
RPVQMRKIRIKPHQGQHKKATVEIVRKKPIF

SEQ ID NO: 130248 - protein, 31 aa, Artificial Sequence
  Cyclic GFR-binding peptide
SNITVQIMEYVRKKPKLLGEMSEIVRKKPIF

SEQ ID NO: 130249 - protein, 31 aa, Artificial Sequence
  Cyclic GFR-binding peptide
SNITVQIMEIVRKKPIFIGEMSEIVRKKPIF

SEQ ID NO: 130250 - protein, 31 aa, Artificial Sequence
  Cyclic GFR-binding peptide
SNITMQIMRIKPHQGQHLGEMSEIVRKKPIF

SEQ ID NO: 130251 - protein, 31 aa, Artificial Sequence
  Cyclic GFR-binding peptide
SNITVQIMEYVRKKPKLIGEMSEIVRKKPIF

SEQ ID NO: 130252 - protein, 31 aa, Artificial Sequence
  Cyclic GFR-binding peptide
SNITVQIMEIVRKKPIFLGEMSEIVRKKPIF

SEQ ID NO: 130253 - protein, 31 aa, Artificial Sequence
  Cyclic GFR-binding peptide
RPVQVRKIEIVRKKPIFKKATVEIVRKKPIF

SEQ ID NO: 130254 - protein, 31 aa, Artificial Sequence
  Cyclic GFR-binding peptide
SNITMQIMRIKPHQGQHIGEMSEIVRKKPIF

SEQ ID NO: 130255 - protein, 31 aa, Artificial Sequence; identical to SEQ ID NO: 130231
  Cyclic GFR-binding peptide

SEQ ID NO: 130256 - protein, 31 aa, Artificial Sequence; identical to SEQ ID NO: 130232
  Cyclic GFR-binding peptide

SEQ ID NO: 130257 - protein, 31 aa, Artificial Sequence; identical to SEQ ID NO: 130233
  Cyclic GFR-binding peptide

SEQ ID NO: 130258 - protein, 31 aa, Artificial Sequence; identical to SEQ ID NO: 130234
  Cyclic GFR-binding peptide

SEQ ID NO: 130259 - protein, 31 aa, Artificial Sequence; identical to SEQ ID NO: 130235
  Cyclic GFR-binding peptide

SEQ ID NO: 130260 - protein, 31 aa, Artificial Sequence; identical to SEQ ID NO: 130236
  Cyclic GFR-binding peptide

SEQ ID NO: 130261 - protein, 31 aa, Artificial Sequence; identical to SEQ ID NO: 130237
  Cyclic GFR-binding peptide

SEQ ID NO: 130262 - protein, 31 aa, Artificial Sequence; identical to SEQ ID NO: 130238
  Cyclic GFR-binding peptide

SEQ ID NO: 130263 - protein, 31 aa, Artificial Sequence; identical to SEQ ID NO: 130239
  Cyclic GFR-binding peptide

SEQ ID NO: 130264 - protein, 31 aa, Artificial Sequence; identical to SEQ ID NO: 130240
  Cyclic GFR-binding peptide

SEQ ID NO: 130265 - protein, 31 aa, Artificial Sequence; identical to SEQ ID NO: 130241
  Cyclic GFR-binding peptide

SEQ ID NO: 130266 - protein, 31 aa, Artificial Sequence; identical to SEQ ID NO: 130242
  Cyclic GFR-binding peptide

SEQ ID NO: 130267 - protein, 31 aa, Artificial Sequence; identical to SEQ ID NO: 130243
  Cyclic GFR-binding peptide

SEQ ID NO: 130268 - protein, 31 aa, Artificial Sequence; identical to SEQ ID NO: 130244
  Cyclic GFR-binding peptide

SEQ ID NO: 130269 - protein, 31 aa, Artificial Sequence; identical to SEQ ID NO: 130245
  Cyclic GFR-binding peptide

SEQ ID NO: 130270 - protein, 31 aa, Artificial Sequence; identical to SEQ ID NO: 130246
  Cyclic GFR-binding peptide

SEQ ID NO: 130271 - protein, 31 aa, Artificial Sequence; identical to SEQ ID NO: 130247
  Cyclic GFR-binding peptide

SEQ ID NO: 130272 - protein, 31 aa, Artificial Sequence; identical to SEQ ID NO: 130248
  Cyclic GFR-binding peptide

SEQ ID NO: 130273 - protein, 31 aa, Artificial Sequence; identical to SEQ ID NO: 130249
  Cyclic GFR-binding peptide

SEQ ID NO: 130274 - protein, 31 aa, Artificial Sequence; identical to SEQ ID NO: 130250
  Cyclic GFR-binding peptide

SEQ ID NO: 130275 - protein, 31 aa, Artificial Sequence; identical to SEQ ID NO: 130251
  Cyclic GFR-binding peptide

SEQ ID NO: 130276 - protein, 31 aa, Artificial Sequence; identical to SEQ ID NO: 130252
  Cyclic GFR-binding peptide

SEQ ID NO: 130277 - protein, 31 aa, Artificial Sequence; identical to SEQ ID NO: 130253
  Cyclic GFR-binding peptide

SEQ ID NO: 130278 - protein, 31 aa, Artificial Sequence; identical to SEQ ID NO: 130254
  Cyclic GFR-binding peptide

SEQ ID NO: 130279 - protein, 29 aa, Artificial Sequence
  Cyclic GFR-binding peptide
EIVRKKPIFEYQKYVVKENEDIYLMSIPS

SEQ ID NO: 130280 - protein, 29 aa, Artificial Sequence
  Cyclic GFR-binding peptide
EIVRKKPIFRYKKLIKPTKGIFYLISIAN

SEQ ID NO: 130281 - protein, 29 aa, Artificial Sequence
  Cyclic GFR-binding peptide
EIVRKKPIFEYKFKVKPTRGVLYLISIPE

SEQ ID NO: 130282 - protein, 29 aa, Artificial Sequence
  Cyclic GFR-binding peptide
EIVRKKPIFYHYKLVVKDYEDKYLMSIPS

SEQ ID NO: 130283 - protein, 29 aa, Artificial Sequence
  Cyclic GFR-binding peptide
EIVRKKPIFEYKFKTPVGMDDLYLVSIPE

SEQ ID NO: 130284 - protein, 29 aa, Artificial Sequence
  Cyclic GFR-binding peptide
EIVRKKPIFEYQKYVKPKRGVIYLISIPS

SEQ ID NO: 130285 - protein, 29 aa, Artificial Sequence
  Cyclic GFR-binding peptide
EIVRKKPIFRYKKLVVKDYEDFYLMSIAN

SEQ ID NO: 130286 - protein, 29 aa, Artificial Sequence
  Cyclic GFR-binding peptide
EIVRKKPIFEYQKYVVKDYEDIYLMSIPS

SEQ ID NO: 130287 - protein, 29 aa, Artificial Sequence
  Cyclic GFR-binding peptide
EIVRKKPIFRYKKLVKPTRGVFYLISIAN

SEQ ID NO: 130288 - protein, 29 aa, Artificial Sequence
  Cyclic GFR-binding peptide
EIVRKKPIFYHYKLIKPTKGIKYLISIPS

SEQ ID NO: 130289 - protein, 29 aa, Artificial Sequence
  Cyclic GFR-binding peptide
EIVRKKPIFYHYKLVVKENEDKYLMSIPS

SEQ ID NO: 130290 - protein, 29 aa, Artificial Sequence
  Cyclic GFR-binding peptide
EIVRKKPIFYHYKLVKPKRGVKYLISIPS

SEQ ID NO: 130291 - protein, 29 aa, Artificial Sequence
  Cyclic GFR-binding peptide
EIVRKKPIFEYKFKIKPTKGILYLISIPE

SEQ ID NO: 130292 - protein, 29 aa, Artificial Sequence
  Cyclic GFR-binding peptide
EIVRKKPIFEYQKYIKPTKGIIYLISIPS

SEQ ID NO: 130293 - protein, 29 aa, Artificial Sequence
  Cyclic GFR-binding peptide
EIVRKKPIFRYKKLVVKENEDFYLMSIAN

SEQ ID NO: 130294 - protein, 29 aa, Artificial Sequence
  Cyclic GFR-binding peptide
EIVRKKPIFRYKKLVVNNAADFYLISIAN

SEQ ID NO: 130295 - protein, 29 aa, Artificial Sequence
  Cyclic GFR-binding peptide
EIVRKKPIFYHYKLYTVVGKDKYLISIPS

SEQ ID NO: 130296 - protein, 29 aa, Artificial Sequence
  Cyclic GFR-binding peptide
EIVRKKPIFRYKKLTPVGMDDFYLVSIAN

SEQ ID NO: 130297 - protein, 29 aa, Artificial Sequence
  Cyclic GFR-binding peptide
EIVRKKPIFRYKKLVKPKRGVFYLISIAN

SEQ ID NO: 130298 - protein, 29 aa, Artificial Sequence
  Cyclic GFR-binding peptide
EIVRKKPIFYHYKLVVNNAADKYLISIPS

SEQ ID NO: 130299 - protein, 29 aa, Artificial Sequence
  Cyclic GFR-binding peptide
EIVRKKPIFYHYKLIVNSSDDKYLVSIPS

SEQ ID NO: 130300 - protein, 29 aa, Artificial Sequence
  Cyclic GFR-binding peptide
EIVRKKPIFRYKKLIVNNSSDFYLVSIAN

SEQ ID NO: 130301 - protein, 29 aa, Artificial Sequence
  Cyclic GFR-binding peptide
EIVRKKPIFRYKKLYTVVGKDFYLISIAN

SEQ ID NO: 130302 - protein, 29 aa, Artificial Sequence
  Cyclic GFR-binding peptide
EIVRKKPIFEYQKYVVNNAADIYLISIPS

SEQ ID NO: 130303 - protein, 29 aa, Artificial Sequence
  Cyclic GFR-binding peptide
EIVRKKPIFRYKKLIVNSSDDFYLVSIAN

SEQ ID NO: 130304 - protein, 29 aa, Artificial Sequence
  Cyclic GFR-binding peptide
EIVRKKPIFEYKFKIVNNSSDLYLVSIPE

SEQ ID NO: 130305 - protein, 29 aa, Artificial Sequence
  Cyclic GFR-binding peptide
EIVRKKPIFEYQKYVKPTRGVIYLISIPS

SEQ ID NO: 130306 - protein, 29 aa, Artificial Sequence
  Cyclic GFR-binding peptide
EIVRKKPIFEYQKYIVNSSDDIYLVSIPS

SEQ ID NO: 130307 - protein, 29 aa, Artificial Sequence
  Cyclic GFR-binding peptide
EIVRKKPIFYHYKLTPVGMDDKYLVSIPS

SEQ ID NO: 130308 - protein, 29 aa, Artificial Sequence
  Cyclic GFR-binding peptide
EIVRKKPIFYHYKLIVNNSSDKYLVSIPS

SEQ ID NO: 130309 - protein, 29 aa, Artificial Sequence
  Cyclic GFR-binding peptide
EIVRKKPIFEYKFKIVNSSDDLYLVSIPE

SEQ ID NO: 130310 - protein, 29 aa, Artificial Sequence
  Cyclic GFR-binding peptide
EIVRKKPIFYHYKLVKPTRGVKYLISIPS

SEQ ID NO: 130311 - protein, 29 aa, Artificial Sequence
  Cyclic GFR-binding peptide
EIVRKKPIFEYKFKVKPKRGVLYLISIPE

SEQ ID NO: 130312 - protein, 29 aa, Artificial Sequence
  Cyclic GFR-binding peptide
EIVRKKPIFEYQKYYTVVGKDIYLISIPS

SEQ ID NO: 130313 - protein, 29 aa, Artificial Sequence
  Cyclic GFR-binding peptide
EIVRKKPIFEYKFKVVKENEDLYLMSIPE

SEQ ID NO: 130314 - protein, 29 aa, Artificial Sequence
  Cyclic GFR-binding peptide
EIVRKKPIFEYQKYTPVGMDDIYLVSIPS

SEQ ID NO: 130315 - protein, 29 aa, Artificial Sequence
  Cyclic GFR-binding peptide
EIVRKKPIFEYQKYIVNNSSDIYLVSIPS

SEQ ID NO: 130316 - protein, 29 aa, Artificial Sequence
  Cyclic GFR-binding peptide
EIVRKKPIFEYKFKVVKDYEDLYLMSIPE

SEQ ID NO: 130317 - protein, 29 aa, Artificial Sequence
  Cyclic GFR-binding peptide
EIVRKKPIFEYKFKYTVVGKDLYLISIPE

SEQ ID NO: 130318 - protein, 29 aa, Artificial Sequence
  Cyclic GFR-binding peptide
EIVRKKPIFEYKFKVVNNAADLYLISIPE

SEQ ID NO: 130319 - protein, 29 aa, Artificial Sequence
  Cyclic GFR-binding peptide
SPISMLYIDENEKVVYKQYEEIVRKKPIF

SEQ ID NO: 130320 - protein, 29 aa, Artificial Sequence
  Cyclic GFR-binding peptide
NAISILYFIGKTPKILKKYREIVRKKPIF

SEQ ID NO: 130321 - protein, 29 aa, Artificial Sequence
  Cyclic GFR-binding peptide
EPISILYLVGRTPKVKFKYEEIVRKKPIF

SEQ ID NO: 130322 - protein, 29 aa, Artificial Sequence
  Cyclic GFR-binding peptide
SPISMLYKDEYDKVVLKYHYEIVRKKPIF

SEQ ID NO: 130323 - protein, 29 aa, Artificial Sequence
  Cyclic GFR-binding peptide
EPISVLYLDDMGVPTKFKYEEIVRKKPIF

SEQ ID NO: 130324 - protein, 29 aa, Artificial Sequence
  Cyclic GFR-binding peptide
SPISILYIVGRKPKVYKQYEEIVRKKPIF

SEQ ID NO: 130325 - protein, 29 aa, Artificial Sequence
  Cyclic GFR-binding peptide
NAISMLYFDEYDKVVLKKYREIVRKKPIF

SEQ ID NO: 130326 - protein, 29 aa, Artificial Sequence
  Cyclic GFR-binding peptide
SPISMLYIDEYDKVVYKQYEEIVRKKPIF

SEQ ID NO: 130327 - protein, 29 aa, Artificial Sequence
  Cyclic GFR-binding peptide
NAISILYFVGRTPKVLKKYREIVRKKPIF

SEQ ID NO: 130328 - protein, 29 aa, Artificial Sequence
  Cyclic GFR-binding peptide
SPISILYKIGKTPKILKYHYEIVRKKPIF

SEQ ID NO: 130329 - protein, 29 aa, Artificial Sequence
  Cyclic GFR-binding peptide
SPISMLYKDENEKVVLKYHYEIVRKKPIF

SEQ ID NO: 130330 - protein, 29 aa, Artificial Sequence
  Cyclic GFR-binding peptide
SPISILYKVGRKPKVLKYHYEIVRKKPIF

SEQ ID NO: 130331 - protein, 29 aa, Artificial Sequence
  Cyclic GFR-binding peptide
EPISILYLIGKTPKIKFKYEEIVRKKPIF

SEQ ID NO: 130332 - protein, 29 aa, Artificial Sequence
  Cyclic GFR-binding peptide
SPISILYIIGKTPKIYKQYEEIVRKKPIF

SEQ ID NO: 130333 - protein, 29 aa, Artificial Sequence
  Cyclic GFR-binding peptide
NAISMLYFDENEKVVLKKYREIVRKKPIF

SEQ ID NO: 130334 - protein, 29 aa, Artificial Sequence
  Cyclic GFR-binding peptide
NAISILYFDAANNVVLKKYREIVRKKPIF

SEQ ID NO: 130335 - protein, 29 aa, Artificial Sequence
  Cyclic GFR-binding peptide
SPISILYKDKGVVTYLKYHYEIVRKKPIF

SEQ ID NO: 130336 - protein, 29 aa, Artificial Sequence
  Cyclic GFR-binding peptide
NAISVLYFDDMGVPTLKKYREIVRKKPIF

SEQ ID NO: 130337 - protein, 29 aa, Artificial Sequence
  Cyclic GFR-binding peptide
NAISILYFVGRKPKVLKKYREIVRKKPIF

SEQ ID NO: 130338 - protein, 29 aa, Artificial Sequence
  Cyclic GFR-binding peptide
SPISILYKDAANNVVLKYHYEIVRKKPIF

SEQ ID NO: 130339 - protein, 29 aa, Artificial Sequence
  Cyclic GFR-binding peptide
SPISVLYKDDSSNVILKYHYEIVRKKPIF

SEQ ID NO: 130340 - protein, 29 aa, Artificial Sequence
  Cyclic GFR-binding peptide
NAISVLYFDSSNNVILKKYREIVRKKPIF

SEQ ID NO: 130341 - protein, 29 aa, Artificial Sequence
  Cyclic GFR-binding peptide
NAISILYFDKGVVTYLKKYREIVRKKPIF

SEQ ID NO: 130342 - protein, 29 aa, Artificial Sequence
  Cyclic GFR-binding peptide
SPISILYIDAANNVVYKQYEEIVRKKPIF

SEQ ID NO: 130343 - protein, 29 aa, Artificial Sequence
  Cyclic GFR-binding peptide
NAISVLYFDDSSNVILKKYREIVRKKPIF

SEQ ID NO: 130344 - protein, 29 aa, Artificial Sequence
  Cyclic GFR-binding peptide
EPISVLYLDSSNNVIKFKYEEIVRKKPIF

SEQ ID NO: 130345 - protein, 29 aa, Artificial Sequence
  Cyclic GFR-binding peptide
SPISILYIVGRTPKVYKQYEEIVRKKPIF

SEQ ID NO: 130346 - protein, 29 aa, Artificial Sequence
  Cyclic GFR-binding peptide
SPISVLYIDDSSNVIYKQYEEIVRKKPIF

SEQ ID NO: 130347 - protein, 29 aa, Artificial Sequence
  Cyclic GFR-binding peptide
SPISVLYKDDMGVPTLKYHYEIVRKKPIF

SEQ ID NO: 130348 - protein, 29 aa, Artificial Sequence
  Cyclic GFR-binding peptide
SPISVLYKDSSNNVILKYHYEIVRKKPIF

SEQ ID NO: 130349 - protein, 29 aa, Artificial Sequence
  Cyclic GFR-binding peptide
EPISVLYLDDSSNVIKFKYEEIVRKKPIF

SEQ ID NO: 130350 - protein, 29 aa, Artificial Sequence
  Cyclic GFR-binding peptide
SPISILYKVGRTPKVLKYHYEIVRKKPIF

SEQ ID NO: 130351 - protein, 29 aa, Artificial Sequence
  Cyclic GFR-binding peptide
EPISILYLVGRKPKVKFKYEEIVRKKPIF

SEQ ID NO: 130352 - protein, 29 aa, Artificial Sequence
  Cyclic GFR-binding peptide
SPISILYIDKGVVTYYKQYEEIVRKKPIF

SEQ ID NO: 130353 - protein, 29 aa, Artificial Sequence
  Cyclic GFR-binding peptide
EPISMLYLDENEKVVKFKYEEIVRKKPIF

SEQ ID NO: 130354 - protein, 29 aa, Artificial Sequence
  Cyclic GFR-binding peptide
SPISVLYIDDMGVPTYKQYEEIVRKKPIF

SEQ ID NO: 130355 - protein, 29 aa, Artificial Sequence
  Cyclic GFR-binding peptide
SPISVLYIDSSNNVIYKQYEEIVRKKPIF

SEQ ID NO: 130356 - protein, 29 aa, Artificial Sequence
  Cyclic GFR-binding peptide
EPISMLYLDEYDKVVKFKYEEIVRKKPIF

SEQ ID NO: 130357 - protein, 29 aa, Artificial Sequence
  Cyclic GFR-binding peptide
EPISILYLDKGVVTYKFKYEEIVRKKPIF

SEQ ID NO: 130358 - protein, 29 aa, Artificial Sequence
  Cyclic GFR-binding peptide
EPISILYLDAANNVVKFKYEEIVRKKPIF

SEQ ID NO: 130359 - protein, 29 aa, Artificial Sequence
  Cyclic GFR-binding peptide
EIVRKKPIFPIKGYIIQQKDNFYLMNIPS

SEQ ID NO: 130360 - protein, 29 aa, Artificial Sequence
  Cyclic GFR-binding peptide
EIVRKKPIFPIKGYVVKDYEDFYLMNIPS

SEQ ID NO: 130361 - protein, 29 aa, Artificial Sequence
  Cyclic GFR-binding peptide
EIVRKKPIFPIKGYIVNSSDDFYLVNIPS

SEQ ID NO: 130362 - protein, 29 aa, Artificial Sequence
  Cyclic GFR-binding peptide
EIVRKKPIFPIKGYLLVRGNDFYLMNIPS

SEQ ID NO: 130363 - protein, 29 aa, Artificial Sequence
  Cyclic GFR-binding peptide
EIVRKKPIFPIKGYVVNNAADFYLINIPS

SEQ ID NO: 130364 - protein, 29 aa, Artificial Sequence
  Cyclic GFR-binding peptide
EIVRKKPIFPIKGYVVKENEDFYLMNIPS

SEQ ID NO: 130365 - protein, 29 aa, Artificial Sequence
  Cyclic GFR-binding peptide
EIVRKKPIFPIKGYVVNNASDFYLINIPS

SEQ ID NO: 130366 - protein, 29 aa, Artificial Sequence
  Cyclic GFR-binding peptide
EIVRKKPIFPIKGYYTVVGKDFYLINIPS

SEQ ID NO: 130367 - protein, 29 aa, Artificial Sequence
  Cyclic GFR-binding peptide
EIVRKKPIFPIKGYTPVGMDDFYLVNIPS

SEQ ID NO: 130368 - protein, 29 aa, Artificial Sequence
  Cyclic GFR-binding peptide
EIVRKKPIFPIKGYIVNNSSDFYLVNIPS

SEQ ID NO: 130369 - protein, 29 aa, Artificial Sequence
  Cyclic GFR-binding peptide
SPINMLYFNDKQQIIYGKIPEIVRKKPIF

SEQ ID NO: 130370 - protein, 29 aa, Artificial Sequence
  Cyclic GFR-binding peptide
SPINMLYFDEYDKVVYGKIPEIVRKKPIF

SEQ ID NO: 130371 - protein, 29 aa, Artificial Sequence
  Cyclic GFR-binding peptide
SPINVLYFDDSSNVIYGKIPEIVRKKPIF

SEQ ID NO: 130372 - protein, 29 aa, Artificial Sequence
  Cyclic GFR-binding peptide
SPINMLYFDNGRVLLYGKIPEIVRKKPIF

SEQ ID NO: 130373 - protein, 29 aa, Artificial Sequence
  Cyclic GFR-binding peptide
SPINILYFDAANNVVYGKIPEIVRKKPIF

SEQ ID NO: 130374 - protein, 29 aa, Artificial Sequence
  Cyclic GFR-binding peptide
SPINMLYFDENEKVVYGKIPEIVRKKPIF

SEQ ID NO: 130375 - protein, 29 aa, Artificial Sequence
  Cyclic GFR-binding peptide
SPINILYFDSANNVVYGKIPEIVRKKPIF

SEQ ID NO: 130376 - protein, 29 aa, Artificial Sequence
  Cyclic GFR-binding peptide
SPINILYFDKGVVTYYGKIPEIVRKKPIF

SEQ ID NO: 130377 - protein, 29 aa, Artificial Sequence
  Cyclic GFR-binding peptide
SPINVLYFDDMGVPTYGKIPEIVRKKPIF

SEQ ID NO: 130378 - protein, 29 aa, Artificial Sequence
  Cyclic GFR-binding peptide
SPINVLYFDSSNNVIYGKIPEIVRKKPIF

SEQ ID NO: 130379 - protein, 29 aa, Artificial Sequence
  Cyclic GFR-binding peptide
EIVRKKPIFPIKGYIIQQKDNFYLMNIPS

SEQ ID NO: 130380 - protein, 29 aa, Artificial Sequence
  Cyclic GFR-binding peptide
EIVRKKPIFPIKGYVVKDYEDFYLMNIPS

SEQ ID NO: 130381 - protein, 29 aa, Artificial Sequence
  Cyclic GFR-binding peptide
EIVRKKPIFPIKGYIVNSSDDFYLVNIPS

SEQ ID NO: 130382 - protein, 29 aa, Artificial Sequence
  Cyclic GFR-binding peptide
EIVRKKPIFPIKGYLLVRGNDFYLMNIPS

SEQ ID NO: 130383 - protein, 29 aa, Artificial Sequence
  Cyclic GFR-binding peptide
EIVRKKPIFPIKGYVVNNAADFYLINIPS

SEQ ID NO: 130384 - protein, 29 aa, Artificial Sequence
  Cyclic GFR-binding peptide
EIVRKKPIFPIKGYVVKENEDFYLMNIPS

SEQ ID NO: 130385 - protein, 29 aa, Artificial Sequence
  Cyclic GFR-binding peptide
EIVRKKPIFPIKGYVVNNASDFYLINIPS

SEQ ID NO: 130386 - protein, 29 aa, Artificial Sequence
  Cyclic GFR-binding peptide
EIVRKKPIFPIKGYYTVVGKDFYLINIPS

SEQ ID NO: 130387 - protein, 29 aa, Artificial Sequence
  Cyclic GFR-binding peptide
EIVRKKPIFPIKGYTPVGMDDFYLVNIPS

SEQ ID NO: 130388 - protein, 29 aa, Artificial Sequence
  Cyclic GFR-binding peptide
EIVRKKPIFPIKGYIVNNSSDFYLVNIPS

SEQ ID NO: 130389 - protein, 29 aa, Artificial Sequence
  Cyclic GFR-binding peptide
SPINMLYFNDKQQIIYGKIPEIVRKKPIF

SEQ ID NO: 130390 - protein, 29 aa, Artificial Sequence
  Cyclic GFR-binding peptide
SPINMLYFDEYDKVVYGKIPEIVRKKPIF

SEQ ID NO: 130391 - protein, 29 aa, Artificial Sequence
  Cyclic GFR-binding peptide
SPINVLYFDDSSNVIYGKIPEIVRKKPIF

SEQ ID NO: 130392 - protein, 29 aa, Artificial Sequence
  Cyclic GFR-binding peptide
SPINMLYFDNGRVLLYGKIPEIVRKKPIF

SEQ ID NO: 130393 - protein, 29 aa, Artificial Sequence
  Cyclic GFR-binding peptide
SPINILYFDAANNVVYGKIPEIVRKKPIF

SEQ ID NO: 130394 - protein, 29 aa, Artificial Sequence
  Cyclic GFR-binding peptide
SPINMLYFDENEKVVYGKIPEIVRKKPIF

SEQ ID NO: 130395 - protein, 29 aa, Artificial Sequence
  Cyclic GFR-binding peptide
SPINILYFDSANNVVYGKIPEIVRKKPIF

SEQ ID NO: 130396 - protein, 29 aa, Artificial Sequence
  Cyclic GFR-binding peptide
SPINILYFDKGVVTYYGKIPEIVRKKPIF

SEQ ID NO: 130397 - protein, 29 aa, Artificial Sequence
  Cyclic GFR-binding peptide
SPINVLYFDDMGVPTYGKIPEIVRKKPIF

SEQ ID NO: 130398 - protein, 29 aa, Artificial Sequence
  Cyclic GFR-binding peptide
SPINVLYFDSSNNVIYGKIPEIVRKKPIF

SEQ ID NO: 130399 - protein, 29 aa, Artificial Sequence
  Cyclic GFR-binding peptide
EIVRKKPIFRYKKLIKPTKGIFYLISIAN

SEQ ID NO: 130400 - protein, 29 aa, Artificial Sequence
  Cyclic GFR-binding peptide
EIVRKKPIFRYKKLVVKDYEDFYLMSIAN

SEQ ID NO: 130401 - protein, 29 aa, Artificial Sequence
  Cyclic GFR-binding peptide
EIVRKKPIFRYKKLVKPTRGVFYLISIAN

SEQ ID NO: 130402 - protein, 29 aa, Artificial Sequence
  Cyclic GFR-binding peptide
EIVRKKPIFRYKKLVVKENEDFYLMSIAN

SEQ ID NO: 130403 - protein, 29 aa, Artificial Sequence
  Cyclic GFR-binding peptide
EIVRKKPIFRYKKLVKPKRGVFYLISIAN

SEQ ID NO: 130404 - protein, 29 aa, Artificial Sequence
  Cyclic GFR-binding peptide
EIVRKKPIFRYKKLIVNSSDDFYLVSIAN

SEQ ID NO: 130405 - protein, 29 aa, Artificial Sequence
  Cyclic GFR-binding peptide
EIVRKKPIFRYKKLVVNNASDFYLISIAN

SEQ ID NO: 130406 - protein, 29 aa, Artificial Sequence
  Cyclic GFR-binding peptide
NAISILYFIGKTPKILKKYREIVRKKPIF

SEQ ID NO: 130407 - protein, 29 aa, Artificial Sequence
  Cyclic GFR-binding peptide
NAISMLYFDEYDKVVLKKYREIVRKKPIF

SEQ ID NO: 130408 - protein, 29 aa, Artificial Sequence
  Cyclic GFR-binding peptide
NAISILYFVGRTPKVLKKYREIVRKKPIF

SEQ ID NO: 130409 - protein, 29 aa, Artificial Sequence
  Cyclic GFR-binding peptide
NAISMLYFDENEKVVLKKYREIVRKKPIF

SEQ ID NO: 130410 - protein, 29 aa, Artificial Sequence
  Cyclic GFR-binding peptide
NAISILYFVGRKPKVLKKYREIVRKKPIF

SEQ ID NO: 130411 - protein, 29 aa, Artificial Sequence
  Cyclic GFR-binding peptide
NAISVLYFDDSSNVILKKYREIVRKKPIF

SEQ ID NO: 130412 - protein, 29 aa, Artificial Sequence
  Cyclic GFR-binding peptide
NAISILYFDSANNVVLKKYREIVRKKPIF

SEQ ID NO: 130413 - protein, 29 aa, Artificial Sequence
  Cyclic GFR-binding peptide
EIVRKKPIFEYQKYVVKENEDIYLMSIPS

SEQ ID NO: 130414 - protein, 29 aa, Artificial Sequence
  Cyclic GFR-binding peptide
EIVRKKPIFNSLQEVVKDYEDYYLMTLPE

SEQ ID NO: 130415 - protein, 29 aa, Artificial Sequence
  Cyclic GFR-binding peptide
EIVRKKPIFEYQKYVVKENEDIFLMSIPS

SEQ ID NO: 130416 - protein, 29 aa, Artificial Sequence
  Cyclic GFR-binding peptide
EIVRKKPIFNSLQEIKPTKGIYYVIPLPE

SEQ ID NO: 130417 - protein, 29 aa, Artificial Sequence
  Cyclic GFR-binding peptide
EIVRKKPIFNSLQEVKPKRGVYYLITLPE

SEQ ID NO: 130418 - protein, 29 aa, Artificial Sequence
  Cyclic GFR-binding peptide
EIVRKKPIFEYQKYVVNNAADIYLISIPS

SEQ ID NO: 130419 - protein, 29 aa, Artificial Sequence
  Cyclic GFR-binding peptide
EIVRKKPIFNSLQEVKPTRGVYYVIPLPE

SEQ ID NO: 130420 - protein, 29 aa, Artificial Sequence
  Cyclic GFR-binding peptide
EIVRKKPIFEYQKYIVNSSDDIFLVSIPS

SEQ ID NO: 130421 - protein, 29 aa, Artificial Sequence
  Cyclic GFR-binding peptide
EIVRKKPIFEYQKYVKPTRGVIFLISIPS

SEQ ID NO: 130422 - protein, 29 aa, Artificial Sequence
  Cyclic GFR-binding peptide
EIVRKKPIFEYQKYVVKDYEDIYLMSIPS

SEQ ID NO: 130423 - protein, 29 aa, Artificial Sequence
  Cyclic GFR-binding peptide
EIVRKKPIFNSLQEVVKENEDYYLMTLPE

SEQ ID NO: 130424 - protein, 29 aa, Artificial Sequence
  Cyclic GFR-binding peptide
EIVRKKPIFNSLQEVVNNASDYYLITLPE

SEQ ID NO: 130425 - protein, 29 aa, Artificial Sequence
  Cyclic GFR-binding peptide
EIVRKKPIFNSLQEVKPKRGVYYVIPLPE

SEQ ID NO: 130426 - protein, 29 aa, Artificial Sequence
  Cyclic GFR-binding peptide
EIVRKKPIFEYQKYIVNSSDDIYLVSIPS

SEQ ID NO: 130427 - protein, 29 aa, Artificial Sequence
  Cyclic GFR-binding peptide
EIVRKKPIFNSLQEVVKENEDYYVMPLPE

SEQ ID NO: 130428 - protein, 29 aa, Artificial Sequence
  Cyclic GFR-binding peptide
EIVRKKPIFEYQKYVVKDYEDIFLMSIPS

SEQ ID NO: 130429 - protein, 29 aa, Artificial Sequence
  Cyclic GFR-binding peptide
EIVRKKPIFNSLQEVVNNASDYYVIPLPE

SEQ ID NO: 130430 - protein, 29 aa, Artificial Sequence
  Cyclic GFR-binding peptide
EIVRKKPIFEYQKYVVNNASDIYLISIPS

SEQ ID NO: 130431 - protein, 29 aa, Artificial Sequence
  Cyclic GFR-binding peptide
EIVRKKPIFNSLQEVKPTRGVYYLITLPE

SEQ ID NO: 130432 - protein, 29 aa, Artificial Sequence
  Cyclic GFR-binding peptide
EIVRKKPIFEYQKYYTVVGKDIYLISIPS

SEQ ID NO: 130433 - protein, 29 aa, Artificial Sequence
  Cyclic GFR-binding peptide
EIVRKKPIFEYQKYIIQQKDNIYLMSIPS

SEQ ID NO: 130434 - protein, 29 aa, Artificial Sequence
  Cyclic GFR-binding peptide
EIVRKKPIFEYQKYTPVGMDDIYLVSIPS

SEQ ID NO: 130435 - protein, 29 aa, Artificial Sequence
  Cyclic GFR-binding peptide
EIVRKKPIFEYQKYIKPTKGIIFLISIPS

SEQ ID NO: 130436 - protein, 29 aa, Artificial Sequence
  Cyclic GFR-binding peptide
EIVRKKPIFEYQKYIVNNSSDIYLVSIPS

SEQ ID NO: 130437 - protein, 29 aa, Artificial Sequence
  Cyclic GFR-binding peptide
EIVRKKPIFNSLQEIKPTKGIYYLITLPE

SEQ ID NO: 130438 - protein, 29 aa, Artificial Sequence
  Cyclic GFR-binding peptide
EIVRKKPIFEYQKYVVNNASDIFLISIPS

SEQ ID NO: 130439 - protein, 29 aa, Artificial Sequence
  Cyclic GFR-binding peptide
EIVRKKPIFEYQKYVKPKRGVIFLISIPS

SEQ ID NO: 130440 - protein, 29 aa, Artificial Sequence
  Cyclic GFR-binding peptide
EIVRKKPIFNSLQEIVNSSDDYYVVPLPE

SEQ ID NO: 130441 - protein, 29 aa, Artificial Sequence
  Cyclic GFR-binding peptide
EIVRKKPIFNSLQEVVKDYEDYYVMPLPE

SEQ ID NO: 130442 - protein, 29 aa, Artificial Sequence
  Cyclic GFR-binding peptide
EIVRKKPIFEYQKYLLVRGNDIYLMSIPS

SEQ ID NO: 130443 - protein, 29 aa, Artificial Sequence
  Cyclic GFR-binding peptide
EIVRKKPIFNSLQEIVNSSDDYYLVTLPE

SEQ ID NO: 130444 - protein, 29 aa, Artificial Sequence
  Cyclic GFR-binding peptide
SPISMLYIDENEKVVYKQYEEIVRKKPIF

SEQ ID NO: 130445 - protein, 29 aa, Artificial Sequence
  Cyclic GFR-binding peptide
EPLTMLYYDEYDKVVEQLSNEIVRKKPIF

SEQ ID NO: 130446 - protein, 29 aa, Artificial Sequence
  Cyclic GFR-binding peptide
SPISMLFIDENEKVVYKQYEEIVRKKPIF

SEQ ID NO: 130447 - protein, 29 aa, Artificial Sequence
  Cyclic GFR-binding peptide
EPLPIVYYIGKTPKIEQLSNEIVRKKPIF

SEQ ID NO: 130448 - protein, 29 aa, Artificial Sequence
  Cyclic GFR-binding peptide
EPLTILYYVGRKPKVEQLSNEIVRKKPIF

SEQ ID NO: 130449 - protein, 29 aa, Artificial Sequence
  Cyclic GFR-binding peptide
SPISILYIDAANNVVYKQYEEIVRKKPIF

SEQ ID NO: 130450 - protein, 29 aa, Artificial Sequence
  Cyclic GFR-binding peptide
EPLPIVYYVGRTPKVEQLSNEIVRKKPIF

SEQ ID NO: 130451 - protein, 29 aa, Artificial Sequence
  Cyclic GFR-binding peptide
SPISVLFIDDSSNVIYKQYEEIVRKKPIF

SEQ ID NO: 130452 - protein, 29 aa, Artificial Sequence
  Cyclic GFR-binding peptide
SPISILFIVGRTPKVYKQYEEIVRKKPIF

SEQ ID NO: 130453 - protein, 29 aa, Artificial Sequence
  Cyclic GFR-binding peptide
SPISMLYIDEYDKVVYKQYEEIVRKKPIF

SEQ ID NO: 130454 - protein, 29 aa, Artificial Sequence
  Cyclic GFR-binding peptide
EPLTMLYYDENEKVVEQLSNEIVRKKPIF

SEQ ID NO: 130455 - protein, 29 aa, Artificial Sequence
  Cyclic GFR-binding peptide
EPLTILYYDSANNVVEQLSNEIVRKKPIF

SEQ ID NO: 130456 - protein, 29 aa, Artificial Sequence
  Cyclic GFR-binding peptide
EPLPIVYYVGRKPKVEQLSNEIVRKKPIF

SEQ ID NO: 130457 - protein, 29 aa, Artificial Sequence
  Cyclic GFR-binding peptide
SPISVLYIDDSSNVIYKQYEEIVRKKPIF

SEQ ID NO: 130458 - protein, 29 aa, Artificial Sequence
  Cyclic GFR-binding peptide
EPLPMVYYDENEKVVEQLSNEIVRKKPIF

SEQ ID NO: 130459 - protein, 29 aa, Artificial Sequence
  Cyclic GFR-binding peptide
SPISMLFIDEYDKVVYKQYEEIVRKKPIF

SEQ ID NO: 130460 - protein, 29 aa, Artificial Sequence
  Cyclic GFR-binding peptide
EPLPIVYYDSANNVVEQLSNEIVRKKPIF

SEQ ID NO: 130461 - protein, 29 aa, Artificial Sequence
  Cyclic GFR-binding peptide
SPISILYIDSANNVVYKQYEEIVRKKPIF

SEQ ID NO: 130462 - protein, 29 aa, Artificial Sequence
  Cyclic GFR-binding peptide
EPLTILYYVGRTPKVEQLSNEIVRKKPIF

SEQ ID NO: 130463 - protein, 29 aa, Artificial Sequence
  Cyclic GFR-binding peptide
SPISILYIDKGVVTYYKQYEEIVRKKPIF

SEQ ID NO: 130464 - protein, 29 aa, Artificial Sequence
  Cyclic GFR-binding peptide
SPISMLYINDKQQIIYKQYEEIVRKKPIF

SEQ ID NO: 130465 - protein, 29 aa, Artificial Sequence
  Cyclic GFR-binding peptide
SPISVLYIDDMGVPTYKQYEEIVRKKPIF

SEQ ID NO: 130466 - protein, 29 aa, Artificial Sequence
  Cyclic GFR-binding peptide
SPISILFIIGKTPKIYKQYEEIVRKKPIF

SEQ ID NO: 130467 - protein, 29 aa, Artificial Sequence
  Cyclic GFR-binding peptide
SPISVLYIDSSNNVIYKQYEEIVRKKPIF

SEQ ID NO: 130468 - protein, 29 aa, Artificial Sequence
  Cyclic GFR-binding peptide
EPLTILYYIGKTPKIEQLSNEIVRKKPIF

SEQ ID NO: 130469 - protein, 29 aa, Artificial Sequence
  Cyclic GFR-binding peptide
SPISILFIDSANNVVYKQYEEIVRKKPIF

SEQ ID NO: 130470 - protein, 29 aa, Artificial Sequence
  Cyclic GFR-binding peptide
SPISILFIVGRKPKVYKQYEEIVRKKPIF

SEQ ID NO: 130471 - protein, 29 aa, Artificial Sequence
  Cyclic GFR-binding peptide
EPLPVVYYDDSSNVIEQLSNEIVRKKPIF

SEQ ID NO: 130472 - protein, 29 aa, Artificial Sequence
  Cyclic GFR-binding peptide
EPLPMVYYDEYDKVVEQLSNEIVRKKPIF

SEQ ID NO: 130473 - protein, 29 aa, Artificial Sequence
  Cyclic GFR-binding peptide
SPISMLYIDNGRVLLYKQYEEIVRKKPIF

SEQ ID NO: 130474 - protein, 29 aa, Artificial Sequence
  Cyclic GFR-binding peptide
EPLTVLYYDDSSNVIEQLSNEIVRKKPIF

SEQ ID NO: 130475 - protein, 29 aa, Artificial Sequence
  Cyclic GFR-binding peptide
EIVRKKPIFPYVKLVVKENEDFFLMSLSS

SEQ ID NO: 130476 - protein, 31 aa, Artificial Sequence
  Cyclic GFR-binding peptide
EIVRKKPIFPYVKLHQGQHPKIRFFLMSLSS

SEQ ID NO: 130477 - protein, 29 aa, Artificial Sequence
  Cyclic GFR-binding peptide
EIVRKKPIFPYVKLVVNKNEDFFLISLSS

SEQ ID NO: 130478 - protein, 29 aa, Artificial Sequence
  Cyclic GFR-binding peptide
EIVRKKPIFPYVKLVKPKRGVLFFISLSS

SEQ ID NO: 130479 - protein, 29 aa, Artificial Sequence
  Cyclic GFR-binding peptide
EIVRKKPIFPYVKLVVNNAADFFLISLSS

SEQ ID NO: 130480 - protein, 29 aa, Artificial Sequence
  Cyclic GFR-binding peptide
EIVRKKPIFPYVKLIVNNSSDFFLVSLSS

SEQ ID NO: 130481 - protein, 29 aa, Artificial Sequence
  Cyclic GFR-binding peptide
EIVRKKPIFPYVKLIIQQKDNFFLMSLSS

SEQ ID NO: 130482 - protein, 29 aa, Artificial Sequence
  Cyclic GFR-binding peptide
EIVRKKPIFPYVKLLLVRGNDFFLMSLSS

SEQ ID NO: 130483 - protein, 29 aa, Artificial Sequence
  Cyclic GFR-binding peptide
EIVRKKPIFPYVKLVKPTRGVLFFISLSS

SEQ ID NO: 130484 - protein, 29 aa, Artificial Sequence
  Cyclic GFR-binding peptide
EIVRKKPIFPYVKLVVNNASDFFLISLSS

SEQ ID NO: 130485 - protein, 29 aa, Artificial Sequence
  Cyclic GFR-binding peptide
EIVRKKPIFPYVKLIKPTKGILFFISLSS

SEQ ID NO: 130486 - protein, 29 aa, Artificial Sequence
  Cyclic GFR-binding peptide
EIVRKKPIFPYVKLTPVGMDDFFLVSLSS

SEQ ID NO: 130487 - protein, 29 aa, Artificial Sequence
  Cyclic GFR-binding peptide
EIVRKKPIFPYVKLYTVVGKDFFLISLSS

SEQ ID NO: 130488 - protein, 29 aa, Artificial Sequence
  Cyclic GFR-binding peptide
EIVRKKPIFPYVKLVVKDYEDFFLMSLSS

SEQ ID NO: 130489 - protein, 29 aa, Artificial Sequence
  Cyclic GFR-binding peptide
EIVRKKPIFPYVKLIVNSSDDFFLVSLSS

SEQ ID NO: 130490 - protein, 31 aa, Artificial Sequence
  Cyclic GFR-binding peptide
EIVRKKPIFPYVKLLKPKKRVYEFFLVSLSS

SEQ ID NO: 130491 - protein, 29 aa, Artificial Sequence
  Cyclic GFR-binding peptide
SSLSMLFFDENEKVVLKVYPEIVRKKPIF

SEQ ID NO: 130492 - protein, 31 aa, Artificial Sequence
  Cyclic GFR-binding peptide
SSLSMLFFRIKPHQGQHLKVYPEIVRKKPIF

SEQ ID NO: 130493 - protein, 29 aa, Artificial Sequence
  Cyclic GFR-binding peptide
SSLSILFFDENKNVVLKVYPEIVRKKPIF

SEQ ID NO: 130494 - protein, 29 aa, Artificial Sequence
  Cyclic GFR-binding peptide
SSLSILFFVGRKPKVLKVYPEIVRKKPIF

SEQ ID NO: 130495 - protein, 29 aa, Artificial Sequence
  Cyclic GFR-binding peptide
SSLSILFFDAANNVVLKVYPEIVRKKPIF

SEQ ID NO: 130496 - protein, 29 aa, Artificial Sequence
  Cyclic GFR-binding peptide
SSLSVLFFDSSNNVILKVYPEIVRKKPIF

SEQ ID NO: 130497 - protein, 29 aa, Artificial Sequence
  Cyclic GFR-binding peptide
SSLSMLFFNDKQQIILKVYPEIVRKKPIF

SEQ ID NO: 130498 - protein, 29 aa, Artificial Sequence
  Cyclic GFR-binding peptide
SSLSMLFFDNGRVLLLKVYPEIVRKKPIF

SEQ ID NO: 130499 - protein, 29 aa, Artificial Sequence
  Cyclic GFR-binding peptide
SSLSILFFVGRTPKVLKVYPEIVRKKPIF

SEQ ID NO: 130500 - protein, 29 aa, Artificial Sequence
  Cyclic GFR-binding peptide
SSLSILFFDSANNVVLKVYPEIVRKKPIF

SEQ ID NO: 130501 - protein, 29 aa, Artificial Sequence
  Cyclic GFR-binding peptide
SSLSILFFIGKTPKILKVYPEIVRKKPIF

SEQ ID NO: 130502 - protein, 29 aa, Artificial Sequence
  Cyclic GFR-binding peptide
SSLSVLFFDDMGVPTLKVYPEIVRKKPIF

SEQ ID NO: 130503 - protein, 29 aa, Artificial Sequence
  Cyclic GFR-binding peptide
SSLSILFFDKGVVTYLKVYPEIVRKKPIF

SEQ ID NO: 130504 - protein, 29 aa, Artificial Sequence
  Cyclic GFR-binding peptide
SSLSMLFFDEYDKVVLKVYPEIVRKKPIF

SEQ ID NO: 130505 - protein, 29 aa, Artificial Sequence
  Cyclic GFR-binding peptide
SSLSVLFFDDSSNVILKVYPEIVRKKPIF

SEQ ID NO: 130506 - protein, 31 aa, Artificial Sequence
  Cyclic GFR-binding peptide
SSLSVLFFEYVRKKPKLLKVYPEIVRKKPIF

SEQ ID NO: 130507 - protein, 29 aa, Artificial Sequence
  Cyclic GFR-binding peptide
EIVRKKPIFNSLQEVVKDYEDYYLMTLPE

SEQ ID NO: 130508 - protein, 29 aa, Artificial Sequence
  Cyclic GFR-binding peptide
EIVRKKPIFNSLQEIKPTKGIYYVIPLPE

SEQ ID NO: 130509 - protein, 29 aa, Artificial Sequence
  Cyclic GFR-binding peptide
EIVRKKPIFSMEGIIVNSSDDMIQVTINS

SEQ ID NO: 130510 - protein, 29 aa, Artificial Sequence
  Cyclic GFR-binding peptide
EIVRKKPIFNSLQEVKPKRGVYYLITLPE

SEQ ID NO: 130511 - protein, 29 aa, Artificial Sequence
  Cyclic GFR-binding peptide
EIVRKKPIFNSLQEVKPTRGVYYVIPLPE

SEQ ID NO: 130512 - protein, 29 aa, Artificial Sequence
  Cyclic GFR-binding peptide
EIVRKKPIFVTAKKVVKENEDIKRMQVPR

SEQ ID NO: 130513 - protein, 29 aa, Artificial Sequence
  Cyclic GFR-binding peptide
EIVRKKPIFNSLQEIVNSSDDYYVVPLPE

SEQ ID NO: 130514 - protein, 31 aa, Artificial Sequence; identical to SEQ ID NO: 130242
  Cyclic GFR-binding peptide

SEQ ID NO: 130515 - protein, 31 aa, Artificial Sequence; identical to SEQ ID NO: 130231
  Cyclic GFR-binding peptide

SEQ ID NO: 130516 - protein, 29 aa, Artificial Sequence
  Cyclic GFR-binding peptide
EIVRKKPIFSMEGIVVKDYEDMIQMTINS

SEQ ID NO: 130517 - protein, 31 aa, Artificial Sequence; identical to SEQ ID NO: 130234
  Cyclic GFR-binding peptide

SEQ ID NO: 130518 - protein, 29 aa, Artificial Sequence
  Cyclic GFR-binding peptide
EIVRKKPIFVTAKKIKPTKGIIKRIQVPR

SEQ ID NO: 130519 - protein, 29 aa, Artificial Sequence
  Cyclic GFR-binding peptide
EIVRKKPIFSMEGIVKPTRGVMIQITINS

SEQ ID NO: 130520 - protein, 31 aa, Artificial Sequence
  Cyclic GFR-binding peptide
EIVRKKPIFNSLQEFIPKKRVIEYYVVPLPE

SEQ ID NO: 130521 - protein, 29 aa, Artificial Sequence
  Cyclic GFR-binding peptide
EIVRKKPIFVQVEKVKPKRGVVKAIKVSR

SEQ ID NO: 130522 - protein, 29 aa, Artificial Sequence
  Cyclic GFR-binding peptide
EIVRKKPIFVQVEKVVKENEDVKAMKVSR

SEQ ID NO: 130523 - protein, 29 aa, Artificial Sequence
  Cyclic GFR-binding peptide
EIVRKKPIFNSLQEVVKENEDYYVMPLPE

SEQ ID NO: 130524 - protein, 29 aa, Artificial Sequence
  Cyclic GFR-binding peptide
EIVRKKPIFVTAKKIVNSSDDIKRVQVPR

SEQ ID NO: 130525 - protein, 29 aa, Artificial Sequence
  Cyclic GFR-binding peptide
EIVRKKPIFVQVEKIKPTKGIVKAIKVSR

SEQ ID NO: 130526 - protein, 29 aa, Artificial Sequence
  Cyclic GFR-binding peptide
EIVRKKPIFNSLQEIKPTKGIYYLITLPE

SEQ ID NO: 130527 - protein, 31 aa, Artificial Sequence
  Cyclic GFR-binding peptide
EIVRKKPIFNSLQEFIPKKRVIEYYLVTLPE

SEQ ID NO: 130528 - protein, 29 aa, Artificial Sequence
  Cyclic GFR-binding peptide
EIVRKKPIFVQVEKIVNSSDDVKAVKVSR

SEQ ID NO: 130529 - protein, 29 aa, Artificial Sequence
  Cyclic GFR-binding peptide
EIVRKKPIFNSLQEIVNSSDDYYLVTLPE

SEQ ID NO: 130530 - protein, 31 aa, Artificial Sequence; identical to SEQ ID NO: 130232
  Cyclic GFR-binding peptide

SEQ ID NO: 130531 - protein, 31 aa, Artificial Sequence; identical to SEQ ID NO: 130233
  Cyclic GFR-binding peptide

SEQ ID NO: 130532 - protein, 31 aa, Artificial Sequence; identical to SEQ ID NO: 130235
  Cyclic GFR-binding peptide

SEQ ID NO: 130533 - protein, 29 aa, Artificial Sequence
  Cyclic GFR-binding peptide
EIVRKKPIFNSLQEVVKENEDYYLMTLPE

SEQ ID NO: 130534 - protein, 31 aa, Artificial Sequence; identical to SEQ ID NO: 130237
  Cyclic GFR-binding peptide

SEQ ID NO: 130535 - protein, 29 aa, Artificial Sequence
  Cyclic GFR-binding peptide
EIVRKKPIFNSLQEVKPKRGVYYVIPLPE

SEQ ID NO: 130536 - protein, 29 aa, Artificial Sequence
  Cyclic GFR-binding peptide
EIVRKKPIFVTAKKVKPKRGVIKRIQVPR

SEQ ID NO: 130537 - protein, 29 aa, Artificial Sequence
  Cyclic GFR-binding peptide
EIVRKKPIFNSLQEVKPTRGVYYLITLPE

SEQ ID NO: 130538 - protein, 29 aa, Artificial Sequence
  Cyclic GFR-binding peptide
EIVRKKPIFVQVEKVKPTRGVVKAIKVSR

SEQ ID NO: 130539 - protein, 31 aa, Artificial Sequence; identical to SEQ ID NO: 130239
  Cyclic GFR-binding peptide

SEQ ID NO: 130540 - protein, 29 aa, Artificial Sequence
  Cyclic GFR-binding peptide
EIVRKKPIFNSLQEVVKDYEDYYVMPLPE

SEQ ID NO: 130541 - protein, 29 aa, Artificial Sequence
  Cyclic GFR-binding peptide
EIVRKKPIFVTAKKVKPTRGVIKRIQVPR

SEQ ID NO: 130542 - protein, 31 aa, Artificial Sequence
  Cyclic GFR-binding peptide
EIVRKKPIFNSLQELKPKKRVYEYYLVTLPE

SEQ ID NO: 130543 - protein, 29 aa, Artificial Sequence
  Cyclic GFR-binding peptide
EIVRKKPIFSMEGIVKPKRGVMIQITINS

SEQ ID NO: 130544 - protein, 29 aa, Artificial Sequence
  Cyclic GFR-binding peptide
EIVRKKPIFSMEGIVVKENEDMIQMTINS

SEQ ID NO: 130545 - protein, 29 aa, Artificial Sequence
  Cyclic GFR-binding peptide
EIVRKKPIFSMEGIIKPTKGIMIQITINS

SEQ ID NO: 130546 - protein, 31 aa, Artificial Sequence
  Cyclic GFR-binding peptide
EIVRKKPIFNSLQEHQGQHPKIRYYLMTLPE

SEQ ID NO: 130547 - protein, 29 aa, Artificial Sequence
  Cyclic GFR-binding peptide
EIVRKKPIFVTAKKVVKDYEDIKRMQVPR

SEQ ID NO: 130548 - protein, 31 aa, Artificial Sequence
  Cyclic GFR-binding peptide
EIVRKKPIFNSLQEHQGQHPKIRYYVMPLPE

SEQ ID NO: 130549 - protein, 31 aa, Artificial Sequence
  Cyclic GFR-binding peptide
EIVRKKPIFNSLQELKPKKRVYEYYVVPLPE

SEQ ID NO: 130550 - protein, 31 aa, Artificial Sequence; identical to SEQ ID NO: 130241
  Cyclic GFR-binding peptide

SEQ ID NO: 130551 - protein, 29 aa, Artificial Sequence
  Cyclic GFR-binding peptide
EIVRKKPIFVQVEKVVKDYEDVKAMKVSR

SEQ ID NO: 130552 - protein, 29 aa, Artificial Sequence
  Cyclic GFR-binding peptide
EPLTMLYYDEYDKVVEQLSNEIVRKKPIF

SEQ ID NO: 130553 - protein, 29 aa, Artificial Sequence
  Cyclic GFR-binding peptide
EPLPIVYYIGKTPKIEQLSNEIVRKKPIF

SEQ ID NO: 130554 - protein, 29 aa, Artificial Sequence
  Cyclic GFR-binding peptide
SNITVQIMDDSSNVIIGEMSEIVRKKPIF

SEQ ID NO: 130555 - protein, 29 aa, Artificial Sequence
  Cyclic GFR-binding peptide
EPLTILYYVGRKPKVEQLSNEIVRKKPIF

SEQ ID NO: 130556 - protein, 29 aa, Artificial Sequence
  Cyclic GFR-binding peptide
EPLPIVYYVGRTPKVEQLSNEIVRKKPIF

SEQ ID NO: 130557 - protein, 29 aa, Artificial Sequence
  Cyclic GFR-binding peptide
RPVQMRKIDENEKVVKKATVEIVRKKPIF

SEQ ID NO: 130558 - protein, 29 aa, Artificial Sequence
  Cyclic GFR-binding peptide
EPLPVVYYDDSSNVIEQLSNEIVRKKPIF

SEQ ID NO: 130559 - protein, 31 aa, Artificial Sequence; identical to SEQ ID NO: 130254
  Cyclic GFR-binding peptide

SEQ ID NO: 130560 - protein, 31 aa, Artificial Sequence; identical to SEQ ID NO: 130243
  Cyclic GFR-binding peptide

SEQ ID NO: 130561 - protein, 29 aa, Artificial Sequence
  Cyclic GFR-binding peptide
SNITMQIMDEYDKVVIGEMSEIVRKKPIF

SEQ ID NO: 130562 - protein, 31 aa, Artificial Sequence; identical to SEQ ID NO: 130246
  Cyclic GFR-binding peptide

SEQ ID NO: 130563 - protein, 29 aa, Artificial Sequence
  Cyclic GFR-binding peptide
RPVQIRKIIGKTPKIKKATVEIVRKKPIF

SEQ ID NO: 130564 - protein, 29 aa, Artificial Sequence
  Cyclic GFR-binding peptide
SNITIQIMVGRTPKVIGEMSEIVRKKPIF

SEQ ID NO: 130565 - protein, 31 aa, Artificial Sequence
  Cyclic GFR-binding peptide
EPLPVVYYEIVRKKPIFEQLSNEIVRKKPIF

SEQ ID NO: 130566 - protein, 29 aa, Artificial Sequence
  Cyclic GFR-binding peptide
RSVKIAKVVGRKPKVKEVQVEIVRKKPIF

SEQ ID NO: 130567 - protein, 29 aa, Artificial Sequence
  Cyclic GFR-binding peptide
RSVKMAKVDENEKVVKEVQVEIVRKKPIF

SEQ ID NO: 130568 - protein, 29 aa, Artificial Sequence
  Cyclic GFR-binding peptide
EPLPMVYYDENEKVVEQLSNEIVRKKPIF

SEQ ID NO: 130569 - protein, 29 aa, Artificial Sequence
  Cyclic GFR-binding peptide
RPVQVRKIDDSSNVIKKATVEIVRKKPIF

SEQ ID NO: 130570 - protein, 29 aa, Artificial Sequence
  Cyclic GFR-binding peptide
RSVKIAKVIGKTPKIKEVQVEIVRKKPIF

SEQ ID NO: 130571 - protein, 29 aa, Artificial Sequence
  Cyclic GFR-binding peptide
EPLTILYYIGKTPKIEQLSNEIVRKKPIF

SEQ ID NO: 130572 - protein, 31 aa, Artificial Sequence
  Cyclic GFR-binding peptide
EPLTVLYYEIVRKKPIFEQLSNEIVRKKPIF

SEQ ID NO: 130573 - protein, 29 aa, Artificial Sequence
  Cyclic GFR-binding peptide
RSVKVAKVDDSSNVIKEVQVEIVRKKPIF

SEQ ID NO: 130574 - protein, 29 aa, Artificial Sequence
  Cyclic GFR-binding peptide
EPLTVLYYDDSSNVIEQLSNEIVRKKPIF

SEQ ID NO: 130575 - protein, 31 aa, Artificial Sequence; identical to SEQ ID NO: 130244
  Cyclic GFR-binding peptide

SEQ ID NO: 130576 - protein, 31 aa, Artificial Sequence; identical to SEQ ID NO: 130245
  Cyclic GFR-binding peptide

SEQ ID NO: 130577 - protein, 31 aa, Artificial Sequence; identical to SEQ ID NO: 130247
  Cyclic GFR-binding peptide

SEQ ID NO: 130578 - protein, 29 aa, Artificial Sequence
  Cyclic GFR-binding peptide
EPLTMLYYDENEKVVEQLSNEIVRKKPIF

SEQ ID NO: 130579 - protein, 31 aa, Artificial Sequence; identical to SEQ ID NO: 130249
  Cyclic GFR-binding peptide

SEQ ID NO: 130580 - protein, 29 aa, Artificial Sequence
  Cyclic GFR-binding peptide
EPLPIVYYVGRKPKVEQLSNEIVRKKPIF

SEQ ID NO: 130581 - protein, 29 aa, Artificial Sequence
  Cyclic GFR-binding peptide
RPVQIRKIVGRKPKVKKATVEIVRKKPIF

SEQ ID NO: 130582 - protein, 29 aa, Artificial Sequence
  Cyclic GFR-binding peptide
EPLTILYYVGRTPKVEQLSNEIVRKKPIF

SEQ ID NO: 130583 - protein, 29 aa, Artificial Sequence
  Cyclic GFR-binding peptide
RSVKIAKVVGRTPKVKEVQVEIVRKKPIF

SEQ ID NO: 130584 - protein, 31 aa, Artificial Sequence; identical to SEQ ID NO: 130251
  Cyclic GFR-binding peptide

SEQ ID NO: 130585 - protein, 29 aa, Artificial Sequence
  Cyclic GFR-binding peptide
EPLPMVYYDEYDKVVEQLSNEIVRKKPIF

SEQ ID NO: 130586 - protein, 29 aa, Artificial Sequence
  Cyclic GFR-binding peptide
RPVQIRKIVGRTPKVKKATVEIVRKKPIF

SEQ ID NO: 130587 - protein, 31 aa, Artificial Sequence
  Cyclic GFR-binding peptide
EPLTVLYYEYVRKKPKLEQLSNEIVRKKPIF

SEQ ID NO: 130588 - protein, 29 aa, Artificial Sequence
  Cyclic GFR-binding peptide
SNITIQIMVGRKPKVIGEMSEIVRKKPIF

SEQ ID NO: 130589 - protein, 29 aa, Artificial Sequence
  Cyclic GFR-binding peptide
SNITMQIMDENEKVVIGEMSEIVRKKPIF

SEQ ID NO: 130590 - protein, 29 aa, Artificial Sequence
  Cyclic GFR-binding peptide
SNITIQIMIGKTPKIIGEMSEIVRKKPIF

SEQ ID NO: 130591 - protein, 31 aa, Artificial Sequence
  Cyclic GFR-binding peptide
EPLTMLYYRIKPHQGQHEQLSNEIVRKKPIF

SEQ ID NO: 130592 - protein, 29 aa, Artificial Sequence
  Cyclic GFR-binding peptide
RPVQMRKIDEYDKVVKKATVEIVRKKPIF

SEQ ID NO: 130593 - protein, 31 aa, Artificial Sequence
  Cyclic GFR-binding peptide
EPLPMVYYRIKPHQGQHEQLSNEIVRKKPIF

SEQ ID NO: 130594 - protein, 31 aa, Artificial Sequence
  Cyclic GFR-binding peptide
EPLPVVYYEYVRKKPKLEQLSNEIVRKKPIF

SEQ ID NO: 130595 - protein, 31 aa, Artificial Sequence; identical to SEQ ID NO: 130253
  Cyclic GFR-binding peptide

SEQ ID NO: 130596 - protein, 29 aa, Artificial Sequence
  Cyclic GFR-binding peptide
RSVKMAKVDEYDKVVKEVQVEIVRKKPIF

SEQ ID NO: 130597 - protein, 29 aa, Artificial Sequence
  Cyclic GFR-binding peptide
EIVRKKPIFRYKKLIIQQKDNFYLMSIAN

SEQ ID NO: 130598 - protein, 29 aa, Artificial Sequence
  Cyclic GFR-binding peptide
EIVRKKPIFRYKKLIVNNSSDFYLVSIAN

SEQ ID NO: 130599 - protein, 29 aa, Artificial Sequence
  Cyclic GFR-binding peptide
EIVRKKPIFRYKKLYTVVGKDFYLISIAN

SEQ ID NO: 130600 - protein, 29 aa, Artificial Sequence
  Cyclic GFR-binding peptide
EIVRKKPIFRYKKLIVNSSDDFYLVSIAN

SEQ ID NO: 130601 - protein, 29 aa, Artificial Sequence
  Cyclic GFR-binding peptide
EIVRKKPIFRYKKLVVKDYEDFYLMSIAN

SEQ ID NO: 130602 - protein, 29 aa, Artificial Sequence
  Cyclic GFR-binding peptide
EIVRKKPIFRYKKLLLVRGNDFYLMSIAN

SEQ ID NO: 130603 - protein, 29 aa, Artificial Sequence
  Cyclic GFR-binding peptide
EIVRKKPIFRYKKLVVKENEDFYLMSIAN

SEQ ID NO: 130604 - protein, 29 aa, Artificial Sequence
  Cyclic GFR-binding peptide
EIVRKKPIFRYKKLVVNNAADFYLISIAN

SEQ ID NO: 130605 - protein, 29 aa, Artificial Sequence
  Cyclic GFR-binding peptide
EIVRKKPIFRYKKLTPVGMDDFYLVSIAN

SEQ ID NO: 130606 - protein, 29 aa, Artificial Sequence
  Cyclic GFR-binding peptide
EIVRKKPIFRYKKLVVNNASDFYLISIAN

SEQ ID NO: 130607 - protein, 29 aa, Artificial Sequence
  Cyclic GFR-binding peptide
NAISMLYFNDKQQIILKKYREIVRKKPIF

SEQ ID NO: 130608 - protein, 29 aa, Artificial Sequence
  Cyclic GFR-binding peptide
NAISVLYFDSSNNVILKKYREIVRKKPIF

SEQ ID NO: 130609 - protein, 29 aa, Artificial Sequence
  Cyclic GFR-binding peptide
NAISILYFDKGVVTYLKKYREIVRKKPIF

SEQ ID NO: 130610 - protein, 29 aa, Artificial Sequence
  Cyclic GFR-binding peptide
NAISVLYFDDSSNVILKKYREIVRKKPIF

SEQ ID NO: 130611 - protein, 29 aa, Artificial Sequence
  Cyclic GFR-binding peptide
NAISMLYFDEYDKVVLKKYREIVRKKPIF

SEQ ID NO: 130612 - protein, 29 aa, Artificial Sequence
  Cyclic GFR-binding peptide
NAISMLYFDNGRVLLLKKYREIVRKKPIF

SEQ ID NO: 130613 - protein, 29 aa, Artificial Sequence
  Cyclic GFR-binding peptide
NAISMLYFDENEKVVLKKYREIVRKKPIF

SEQ ID NO: 130614 - protein, 29 aa, Artificial Sequence
  Cyclic GFR-binding peptide
NAISILYFDAANNVVLKKYREIVRKKPIF

SEQ ID NO: 130615 - protein, 29 aa, Artificial Sequence
  Cyclic GFR-binding peptide
NAISVLYFDDMGVPTLKKYREIVRKKPIF

SEQ ID NO: 130616 - protein, 29 aa, Artificial Sequence
  Cyclic GFR-binding peptide
NAISILYFDSANNVVLKKYREIVRKKPIF

SEQ ID NO: 130617 - protein, 29 aa, Artificial Sequence
  Cyclic GFR-binding peptide
EIVRKKPIFEYKFKVKPTRGVLYLISIPE

SEQ ID NO: 130618 - protein, 29 aa, Artificial Sequence
  Cyclic GFR-binding peptide
EIVRKKPIFYHYKLVVKDYEDKYLMSIPS

SEQ ID NO: 130619 - protein, 29 aa, Artificial Sequence
  Cyclic GFR-binding peptide
EIVRKKPIFEYKFKTPVGMDDLYLVSIPE

SEQ ID NO: 130620 - protein, 29 aa, Artificial Sequence
  Cyclic GFR-binding peptide
EIVRKKPIFRYKKLVVKDYEDFYLMSIAN

SEQ ID NO: 130621 - protein, 29 aa, Artificial Sequence
  Cyclic GFR-binding peptide
EIVRKKPIFRHKRLVKPKRGVYYLISTAS

SEQ ID NO: 130622 - protein, 29 aa, Artificial Sequence
  Cyclic GFR-binding peptide
EIVRKKPIFYHYKLVKPKRGVKYLISIPS

SEQ ID NO: 130623 - protein, 29 aa, Artificial Sequence
  Cyclic GFR-binding peptide
EIVRKKPIFEYKFKIKPTKGILYLISIPE

SEQ ID NO: 130624 - protein, 29 aa, Artificial Sequence
  Cyclic GFR-binding peptide
EIVRKKPIFEYKFKVVNKNEDLYLISIPE

SEQ ID NO: 130625 - protein, 29 aa, Artificial Sequence
  Cyclic GFR-binding peptide
EIVRKKPIFPIKGYVKPTRGVFYLINIPS

SEQ ID NO: 130626 - protein, 29 aa, Artificial Sequence
  Cyclic GFR-binding peptide
EIVRKKPIFPIKGYVVKENEDFYLMNIPS

SEQ ID NO: 130627 - protein, 29 aa, Artificial Sequence
  Cyclic GFR-binding peptide
EIVRKKPIFYHYKLYTVVGKDKYLISIPS

SEQ ID NO: 130628 - protein, 29 aa, Artificial Sequence
  Cyclic GFR-binding peptide
EIVRKKPIFEYKFKLLVRGNDLYLMSIPE

SEQ ID NO: 130629 - protein, 29 aa, Artificial Sequence
  Cyclic GFR-binding peptide
EIVRKKPIFRYKKLVKPKRGVFYLISIAN

SEQ ID NO: 130630 - protein, 29 aa, Artificial Sequence
  Cyclic GFR-binding peptide
EIVRKKPIFPIKGYTPVGMDDFYLVNIPS

SEQ ID NO: 130631 - protein, 29 aa, Artificial Sequence
  Cyclic GFR-binding peptide
EIVRKKPIFYHYKLVVNKNEDKYLISIPS

SEQ ID NO: 130632 - protein, 29 aa, Artificial Sequence
  Cyclic GFR-binding peptide
EIVRKKPIFYHYKLIVNSSDDKYLVSIPS

SEQ ID NO: 130633 - protein, 29 aa, Artificial Sequence
  Cyclic GFR-binding peptide
EIVRKKPIFPIKGYIVNSSDDFYLVNIPS

SEQ ID NO: 130634 - protein, 29 aa, Artificial Sequence
  Cyclic GFR-binding peptide
EIVRKKPIFRYKKLYTVVGKDFYLISIAN

SEQ ID NO: 130635 - protein, 29 aa, Artificial Sequence
  Cyclic GFR-binding peptide
EIVRKKPIFRHKRLLLVRGNDYYLMSTAS

SEQ ID NO: 130636 - protein, 29 aa, Artificial Sequence
  Cyclic GFR-binding peptide
EIVRKKPIFYHYKLLLVRGNDKYLMSIPS

SEQ ID NO: 130637 - protein, 29 aa, Artificial Sequence
  Cyclic GFR-binding peptide
EIVRKKPIFRYKKLIVNSSDDFYLVSIAN

SEQ ID NO: 130638 - protein, 29 aa, Artificial Sequence
  Cyclic GFR-binding peptide
EIVRKKPIFRHKRLVVNKNEDYYLISTAS

SEQ ID NO: 130639 - protein, 29 aa, Artificial Sequence
  Cyclic GFR-binding peptide
EIVRKKPIFRHKRLIKPTKGIYYLISTAS

SEQ ID NO: 130640 - protein, 29 aa, Artificial Sequence
  Cyclic GFR-binding peptide
EIVRKKPIFPIKGYYTVVGKDFYLINIPS

SEQ ID NO: 130641 - protein, 29 aa, Artificial Sequence
  Cyclic GFR-binding peptide
EIVRKKPIFYHYKLTPVGMDDKYLVSIPS

SEQ ID NO: 130642 - protein, 29 aa, Artificial Sequence
  Cyclic GFR-binding peptide
EIVRKKPIFRHKRLIVNNSSDYYLVSTAS

SEQ ID NO: 130643 - protein, 29 aa, Artificial Sequence
  Cyclic GFR-binding peptide
EIVRKKPIFRYKKLLLVRGNDFYLMSIAN

SEQ ID NO: 130644 - protein, 29 aa, Artificial Sequence
  Cyclic GFR-binding peptide
EIVRKKPIFYHYKLVKPTRGVKYLISIPS

SEQ ID NO: 130645 - protein, 29 aa, Artificial Sequence
  Cyclic GFR-binding peptide
EIVRKKPIFRHKRLIVNSSDDYYLVSTAS

SEQ ID NO: 130646 - protein, 29 aa, Artificial Sequence
  Cyclic GFR-binding peptide
EIVRKKPIFPIKGYLLVRGNDFYLMNIPS

SEQ ID NO: 130647 - protein, 29 aa, Artificial Sequence
  Cyclic GFR-binding peptide
EIVRKKPIFRYKKLVVNKNEDFYLISIAN

SEQ ID NO: 130648 - protein, 29 aa, Artificial Sequence
  Cyclic GFR-binding peptide
EIVRKKPIFEYKFKVVKDYEDLYLMSIPE

SEQ ID NO: 130649 - protein, 29 aa, Artificial Sequence
  Cyclic GFR-binding peptide
EIVRKKPIFPIKGYVVNKNEDFYLINIPS

SEQ ID NO: 130650 - protein, 29 aa, Artificial Sequence
  Cyclic GFR-binding peptide
EIVRKKPIFPIKGYIKPTKGIFYLINIPS

SEQ ID NO: 130651 - protein, 29 aa, Artificial Sequence
  Cyclic GFR-binding peptide
EIVRKKPIFEYKFKVVNNAADLYLISIPE

SEQ ID NO: 130652 - protein, 29 aa, Artificial Sequence
  Cyclic GFR-binding peptide
EIVRKKPIFRHKRLYTVVGKDYYLISTAS

SEQ ID NO: 130653 - protein, 29 aa, Artificial Sequence
  Cyclic GFR-binding peptide
EIVRKKPIFRYKKLIKPTKGIFYLISIAN

SEQ ID NO: 130654 - protein, 29 aa, Artificial Sequence
  Cyclic GFR-binding peptide
EIVRKKPIFPIKGYVVKDYEDFYLMNIPS

SEQ ID NO: 130655 - protein, 29 aa, Artificial Sequence
  Cyclic GFR-binding peptide
EIVRKKPIFEYKFKVVNNASDLYLISIPE

SEQ ID NO: 130656 - protein, 29 aa, Artificial Sequence
  Cyclic GFR-binding peptide
EIVRKKPIFRYKKLVKPTRGVFYLISIAN

SEQ ID NO: 130657 - protein, 29 aa, Artificial Sequence
  Cyclic GFR-binding peptide
EIVRKKPIFRHKRLVVKENEDYYLMSTAS

SEQ ID NO: 130658 - protein, 29 aa, Artificial Sequence
  Cyclic GFR-binding peptide
EIVRKKPIFYHYKLIKPTKGIKYLISIPS

SEQ ID NO: 130659 - protein, 29 aa, Artificial Sequence
  Cyclic GFR-binding peptide
EIVRKKPIFYHYKLVVKENEDKYLMSIPS

SEQ ID NO: 130660 - protein, 29 aa, Artificial Sequence
  Cyclic GFR-binding peptide
EIVRKKPIFRHKRLIIQQKDNYYLMSTAS

SEQ ID NO: 130661 - protein, 29 aa, Artificial Sequence
  Cyclic GFR-binding peptide
EIVRKKPIFRYKKLVVKENEDFYLMSIAN

SEQ ID NO: 130662 - protein, 29 aa, Artificial Sequence
  Cyclic GFR-binding peptide
EIVRKKPIFRYKKLVVNNAADFYLISIAN

SEQ ID NO: 130663 - protein, 29 aa, Artificial Sequence
  Cyclic GFR-binding peptide
EIVRKKPIFEYKFKIIQQKDNLYLMSIPE

SEQ ID NO: 130664 - protein, 29 aa, Artificial Sequence
  Cyclic GFR-binding peptide
EIVRKKPIFRYKKLTPVGMDDFYLVSIAN

SEQ ID NO: 130665 - protein, 29 aa, Artificial Sequence
  Cyclic GFR-binding peptide
EIVRKKPIFYHYKLVVNNAADKYLISIPS

SEQ ID NO: 130666 - protein, 29 aa, Artificial Sequence
  Cyclic GFR-binding peptide
EIVRKKPIFPIKGYIVNNSSDFYLVNIPS

SEQ ID NO: 130667 - protein, 29 aa, Artificial Sequence
  Cyclic GFR-binding peptide
EIVRKKPIFPIKGYVKPKRGVFYLINIPS

SEQ ID NO: 130668 - protein, 29 aa, Artificial Sequence
  Cyclic GFR-binding peptide
EIVRKKPIFRYKKLIIQQKDNFYLMSIAN

SEQ ID NO: 130669 - protein, 29 aa, Artificial Sequence
  Cyclic GFR-binding peptide
EIVRKKPIFPIKGYIIQQKDNFYLMNIPS

SEQ ID NO: 130670 - protein, 29 aa, Artificial Sequence
  Cyclic GFR-binding peptide
EIVRKKPIFRYKKLIVNNSSDFYLVSIAN

SEQ ID NO: 130671 - protein, 29 aa, Artificial Sequence
  Cyclic GFR-binding peptide
EIVRKKPIFPIKGYVVNNAADFYLINIPS

SEQ ID NO: 130672 - protein, 29 aa, Artificial Sequence
  Cyclic GFR-binding peptide
EIVRKKPIFRHKRLVKPTRGVYYLISTAS

SEQ ID NO: 130673 - protein, 29 aa, Artificial Sequence
  Cyclic GFR-binding peptide
EIVRKKPIFEYKFKIVNNSSDLYLVSIPE

SEQ ID NO: 130674 - protein, 29 aa, Artificial Sequence
  Cyclic GFR-binding peptide
EIVRKKPIFRHKRLVVNNASDYYLISTAS

SEQ ID NO: 130675 - protein, 29 aa, Artificial Sequence
  Cyclic GFR-binding peptide
EIVRKKPIFRHKRLTPVGMDDYYLVSTAS

SEQ ID NO: 130676 - protein, 29 aa, Artificial Sequence
  Cyclic GFR-binding peptide
EIVRKKPIFYHYKLIVNNSSDKYLVSIPS

SEQ ID NO: 130677 - protein, 29 aa, Artificial Sequence
  Cyclic GFR-binding peptide
EIVRKKPIFYHYKLVVNNASDKYLISIPS

SEQ ID NO: 130678 - protein, 29 aa, Artificial Sequence
  Cyclic GFR-binding peptide
EIVRKKPIFEYKFKIVNSSDDLYLVSIPE

SEQ ID NO: 130679 - protein, 29 aa, Artificial Sequence
  Cyclic GFR-binding peptide
EIVRKKPIFEYKFKVKPKRGVLYLISIPE

SEQ ID NO: 130680 - protein, 29 aa, Artificial Sequence
  Cyclic GFR-binding peptide
EIVRKKPIFRHKRLVVKDYEDYYLMSTAS

SEQ ID NO: 130681 - protein, 29 aa, Artificial Sequence
  Cyclic GFR-binding peptide
EIVRKKPIFEYKFKVVKENEDLYLMSIPE

SEQ ID NO: 130682 - protein, 29 aa, Artificial Sequence
  Cyclic GFR-binding peptide
EIVRKKPIFEYKFKYTVVGKDLYLISIPE

SEQ ID NO: 130683 - protein, 29 aa, Artificial Sequence
  Cyclic GFR-binding peptide
EIVRKKPIFPIKGYVVNNASDFYLINIPS

SEQ ID NO: 130684 - protein, 29 aa, Artificial Sequence
  Cyclic GFR-binding peptide
EIVRKKPIFYHYKLIIQQKDNKYLMSIPS

SEQ ID NO: 130685 - protein, 29 aa, Artificial Sequence
  Cyclic GFR-binding peptide
EIVRKKPIFRYKKLVVNNASDFYLISIAN

SEQ ID NO: 130686 - protein, 29 aa, Artificial Sequence
  Cyclic GFR-binding peptide
EIVRKKPIFRHKRLVVNNAADYYLISTAS

SEQ ID NO: 130687 - protein, 29 aa, Artificial Sequence
  Cyclic GFR-binding peptide
EPISILYLVGRTPKVKFKYEEIVRKKPIF

SEQ ID NO: 130688 - protein, 29 aa, Artificial Sequence
  Cyclic GFR-binding peptide
SPISMLYKDEYDKVVLKYHYEIVRKKPIF

SEQ ID NO: 130689 - protein, 29 aa, Artificial Sequence
  Cyclic GFR-binding peptide
EPISVLYLDDMGVPTKFKYEEIVRKKPIF

SEQ ID NO: 130690 - protein, 29 aa, Artificial Sequence
  Cyclic GFR-binding peptide
NAISMLYFDEYDKVVLKKYREIVRKKPIF

SEQ ID NO: 130691 - protein, 29 aa, Artificial Sequence
  Cyclic GFR-binding peptide
SATSILYYVGRKPKVLRKHREIVRKKPIF

SEQ ID NO: 130692 - protein, 29 aa, Artificial Sequence
  Cyclic GFR-binding peptide
SPISILYKVGRKPKVLKYHYEIVRKKPIF

SEQ ID NO: 130693 - protein, 29 aa, Artificial Sequence
  Cyclic GFR-binding peptide
EPISILYLIGKTPKIKFKYEEIVRKKPIF

SEQ ID NO: 130694 - protein, 29 aa, Artificial Sequence
  Cyclic GFR-binding peptide
EPISILYLDENKNVVKFKYEEIVRKKPIF

SEQ ID NO: 130695 - protein, 29 aa, Artificial Sequence
  Cyclic GFR-binding peptide
SPINILYFVGRTPKVYGKIPEIVRKKPIF

SEQ ID NO: 130696 - protein, 29 aa, Artificial Sequence
  Cyclic GFR-binding peptide
SPINMLYFDENEKVVYGKIPEIVRKKPIF

SEQ ID NO: 130697 - protein, 29 aa, Artificial Sequence
  Cyclic GFR-binding peptide
SPISILYKDKGVVTYLKYHYEIVRKKPIF

SEQ ID NO: 130698 - protein, 29 aa, Artificial Sequence
  Cyclic GFR-binding peptide
EPISMLYLDNGRVLLKFKYEEIVRKKPIF

SEQ ID NO: 130699 - protein, 29 aa, Artificial Sequence
  Cyclic GFR-binding peptide
NAISILYFVGRKPKVLKKYREIVRKKPIF

SEQ ID NO: 130700 - protein, 29 aa, Artificial Sequence
  Cyclic GFR-binding peptide
SPINVLYFDDMGVPTYGKIPEIVRKKPIF

SEQ ID NO: 130701 - protein, 29 aa, Artificial Sequence
  Cyclic GFR-binding peptide
SPISILYKDENKNVVLKYHYEIVRKKPIF

SEQ ID NO: 130702 - protein, 29 aa, Artificial Sequence
  Cyclic GFR-binding peptide
SPISVLYKDDSSNVILKYHYEIVRKKPIF

SEQ ID NO: 130703 - protein, 29 aa, Artificial Sequence
  Cyclic GFR-binding peptide
SPINVLYFDDSSNVIYGKIPEIVRKKPIF

SEQ ID NO: 130704 - protein, 29 aa, Artificial Sequence
  Cyclic GFR-binding peptide
NAISILYFDKGVVTYLKKYREIVRKKPIF

SEQ ID NO: 130705 - protein, 29 aa, Artificial Sequence
  Cyclic GFR-binding peptide
SATSMLYYDNGRVLLLRKHREIVRKKPIF

SEQ ID NO: 130706 - protein, 29 aa, Artificial Sequence
  Cyclic GFR-binding peptide
SPISMLYKDNGRVLLLKYHYEIVRKKPIF

SEQ ID NO: 130707 - protein, 29 aa, Artificial Sequence
  Cyclic GFR-binding peptide
NAISVLYFDDSSNVILKKYREIVRKKPIF

SEQ ID NO: 130708 - protein, 29 aa, Artificial Sequence
  Cyclic GFR-binding peptide
SATSILYYDENKNVVLRKHREIVRKKPIF

SEQ ID NO: 130709 - protein, 29 aa, Artificial Sequence
  Cyclic GFR-binding peptide
SATSILYYIGKTPKILRKHREIVRKKPIF

SEQ ID NO: 130710 - protein, 29 aa, Artificial Sequence
  Cyclic GFR-binding peptide
SPINILYFDKGVVTYYGKIPEIVRKKPIF

SEQ ID NO: 130711 - protein, 29 aa, Artificial Sequence
  Cyclic GFR-binding peptide
SPISVLYKDDMGVPTLKYHYEIVRKKPIF

SEQ ID NO: 130712 - protein, 29 aa, Artificial Sequence
  Cyclic GFR-binding peptide
SATSVLYYDSSNNVILRKHREIVRKKPIF

SEQ ID NO: 130713 - protein, 29 aa, Artificial Sequence
  Cyclic GFR-binding peptide
NAISMLYFDNGRVLLLKKYREIVRKKPIF

SEQ ID NO: 130714 - protein, 29 aa, Artificial Sequence
  Cyclic GFR-binding peptide
SPISILYKVGRTPKVLKYHYEIVRKKPIF

SEQ ID NO: 130715 - protein, 29 aa, Artificial Sequence
  Cyclic GFR-binding peptide
SATSVLYYDDSSNVILRKHREIVRKKPIF

SEQ ID NO: 130716 - protein, 29 aa, Artificial Sequence
  Cyclic GFR-binding peptide
SPINMLYFDNGRVLLYGKIPEIVRKKPIF

SEQ ID NO: 130717 - protein, 29 aa, Artificial Sequence
  Cyclic GFR-binding peptide
NAISILYFDENKNVVLKKYREIVRKKPIF

SEQ ID NO: 130718 - protein, 29 aa, Artificial Sequence
  Cyclic GFR-binding peptide
EPISMLYLDEYDKVVKFKYEEIVRKKPIF

SEQ ID NO: 130719 - protein, 29 aa, Artificial Sequence
  Cyclic GFR-binding peptide
SPINILYFDENKNVVYGKIPEIVRKKPIF

SEQ ID NO: 130720 - protein, 29 aa, Artificial Sequence
  Cyclic GFR-binding peptide
SPINILYFIGKTPKIYGKIPEIVRKKPIF

SEQ ID NO: 130721 - protein, 29 aa, Artificial Sequence
  Cyclic GFR-binding peptide
EPISILYLDAANNVVKFKYEEIVRKKPIF

SEQ ID NO: 130722 - protein, 29 aa, Artificial Sequence
  Cyclic GFR-binding peptide
SATSILYYDKGVVTYLRKHREIVRKKPIF

SEQ ID NO: 130723 - protein, 29 aa, Artificial Sequence
  Cyclic GFR-binding peptide
NAISILYFIGKTPKILKKYREIVRKKPIF

SEQ ID NO: 130724 - protein, 29 aa, Artificial Sequence
  Cyclic GFR-binding peptide
SPINMLYFDEYDKVVYGKIPEIVRKKPIF

SEQ ID NO: 130725 - protein, 29 aa, Artificial Sequence
  Cyclic GFR-binding peptide
EPISILYLDSANNVVKFKYEEIVRKKPIF

SEQ ID NO: 130726 - protein, 29 aa, Artificial Sequence
  Cyclic GFR-binding peptide
NAISILYFVGRTPKVLKKYREIVRKKPIF

SEQ ID NO: 130727 - protein, 29 aa, Artificial Sequence
  Cyclic GFR-binding peptide
SATSMLYYDENEKVVLRKHREIVRKKPIF

SEQ ID NO: 130728 - protein, 29 aa, Artificial Sequence
  Cyclic GFR-binding peptide
SPISILYKIGKTPKILKYHYEIVRKKPIF

SEQ ID NO: 130729 - protein, 29 aa, Artificial Sequence
  Cyclic GFR-binding peptide
SPISMLYKDENEKVVLKYHYEIVRKKPIF

SEQ ID NO: 130730 - protein, 29 aa, Artificial Sequence
  Cyclic GFR-binding peptide
SATSMLYYNDKQQIILRKHREIVRKKPIF

SEQ ID NO: 130731 - protein, 29 aa, Artificial Sequence
  Cyclic GFR-binding peptide
NAISMLYFDENEKVVLKKYREIVRKKPIF

SEQ ID NO: 130732 - protein, 29 aa, Artificial Sequence
  Cyclic GFR-binding peptide
NAISILYFDAANNVVLKKYREIVRKKPIF

SEQ ID NO: 130733 - protein, 29 aa, Artificial Sequence
  Cyclic GFR-binding peptide
EPISMLYLNDKQQIIKFKYEEIVRKKPIF

SEQ ID NO: 130734 - protein, 29 aa, Artificial Sequence
  Cyclic GFR-binding peptide
NAISVLYFDDMGVPTLKKYREIVRKKPIF

SEQ ID NO: 130735 - protein, 29 aa, Artificial Sequence
  Cyclic GFR-binding peptide
SPISILYKDAANNVVLKYHYEIVRKKPIF

SEQ ID NO: 130736 - protein, 29 aa, Artificial Sequence
  Cyclic GFR-binding peptide
SPINVLYFDSSNNVIYGKIPEIVRKKPIF

SEQ ID NO: 130737 - protein, 29 aa, Artificial Sequence
  Cyclic GFR-binding peptide
SPINILYFVGRKPKVYGKIPEIVRKKPIF

SEQ ID NO: 130738 - protein, 29 aa, Artificial Sequence
  Cyclic GFR-binding peptide
NAISMLYFNDKQQIILKKYREIVRKKPIF

SEQ ID NO: 130739 - protein, 29 aa, Artificial Sequence
  Cyclic GFR-binding peptide
SPINMLYFNDKQQIIYGKIPEIVRKKPIF

SEQ ID NO: 130740 - protein, 29 aa, Artificial Sequence
  Cyclic GFR-binding peptide
NAISVLYFDSSNNVILKKYREIVRKKPIF

SEQ ID NO: 130741 - protein, 29 aa, Artificial Sequence
  Cyclic GFR-binding peptide
SPINILYFDAANNVVYGKIPEIVRKKPIF

SEQ ID NO: 130742 - protein, 29 aa, Artificial Sequence
  Cyclic GFR-binding peptide
SATSILYYVGRTPKVLRKHREIVRKKPIF

SEQ ID NO: 130743 - protein, 29 aa, Artificial Sequence
  Cyclic GFR-binding peptide
EPISVLYLDSSNNVIKFKYEEIVRKKPIF

SEQ ID NO: 130744 - protein, 29 aa, Artificial Sequence
  Cyclic GFR-binding peptide
SATSILYYDSANNVVLRKHREIVRKKPIF

SEQ ID NO: 130745 - protein, 29 aa, Artificial Sequence
  Cyclic GFR-binding peptide
SATSVLYYDDMGVPTLRKHREIVRKKPIF

SEQ ID NO: 130746 - protein, 29 aa, Artificial Sequence
  Cyclic GFR-binding peptide
SPISVLYKDSSNNVILKYHYEIVRKKPIF

SEQ ID NO: 130747 - protein, 29 aa, Artificial Sequence
  Cyclic GFR-binding peptide
SPISILYKDSANNVVLKYHYEIVRKKPIF

SEQ ID NO: 130748 - protein, 29 aa, Artificial Sequence
  Cyclic GFR-binding peptide
EPISVLYLDDSSNVIKFKYEEIVRKKPIF

SEQ ID NO: 130749 - protein, 29 aa, Artificial Sequence
  Cyclic GFR-binding peptide
EPISILYLVGRKPKVKFKYEEIVRKKPIF

SEQ ID NO: 130750 - protein, 29 aa, Artificial Sequence
  Cyclic GFR-binding peptide
SATSMLYYDEYDKVVLRKHREIVRKKPIF

SEQ ID NO: 130751 - protein, 29 aa, Artificial Sequence
  Cyclic GFR-binding peptide
EPISMLYLDENEKVVKFKYEEIVRKKPIF

SEQ ID NO: 130752 - protein, 29 aa, Artificial Sequence
  Cyclic GFR-binding peptide
EPISILYLDKGVVTYKFKYEEIVRKKPIF

SEQ ID NO: 130753 - protein, 29 aa, Artificial Sequence
  Cyclic GFR-binding peptide
SPINILYFDSANNVVYGKIPEIVRKKPIF

SEQ ID NO: 130754 - protein, 29 aa, Artificial Sequence
  Cyclic GFR-binding peptide
SPISMLYKNDKQQIILKYHYEIVRKKPIF

SEQ ID NO: 130755 - protein, 29 aa, Artificial Sequence
  Cyclic GFR-binding peptide
NAISILYFDSANNVVLKKYREIVRKKPIF

SEQ ID NO: 130756 - protein, 29 aa, Artificial Sequence
  Cyclic GFR-binding peptide
SATSILYYDAANNVVLRKHREIVRKKPIF

SEQ ID NO: 130757 - protein, 29 aa, Artificial Sequence
  Cyclic GFR-binding peptide
EIVRKKPIFSMEGIIIQQKDNMIQMTINS

SEQ ID NO: 130758 - protein, 29 aa, Artificial Sequence
  Cyclic GFR-binding peptide
EIVRKKPIFSMEGIIVNSSDDMIQVTINS

SEQ ID NO: 130759 - protein, 29 aa, Artificial Sequence
  Cyclic GFR-binding peptide
EIVRKKPIFSMEGLVKPKRGVMIQITINS

SEQ ID NO: 130760 - protein, 29 aa, Artificial Sequence
  Cyclic GFR-binding peptide
EIVRKKPIFSMEGLVVNNASDMIQITINS

SEQ ID NO: 130761 - protein, 31 aa, Artificial Sequence; identical to SEQ ID NO: 130237
  Cyclic GFR-binding peptide

SEQ ID NO: 130762 - protein, 29 aa, Artificial Sequence
  Cyclic GFR-binding peptide
EIVRKKPIFSMEGILLVRGNDMIQMTINS

SEQ ID NO: 130763 - protein, 31 aa, Artificial Sequence; identical to SEQ ID NO: 130239
  Cyclic GFR-binding peptide

SEQ ID NO: 130764 - protein, 29 aa, Artificial Sequence
  Cyclic GFR-binding peptide
EIVRKKPIFSMEGLIKPTKGIMIQITINS

SEQ ID NO: 130765 - protein, 29 aa, Artificial Sequence
  Cyclic GFR-binding peptide
EIVRKKPIFSMEGLIVNSSDDMIQVTINS

SEQ ID NO: 130766 - protein, 31 aa, Artificial Sequence; identical to SEQ ID NO: 130242
  Cyclic GFR-binding peptide

SEQ ID NO: 130767 - protein, 29 aa, Artificial Sequence
  Cyclic GFR-binding peptide
EIVRKKPIFSMEGIVVNNASDMIQITINS

SEQ ID NO: 130768 - protein, 31 aa, Artificial Sequence; identical to SEQ ID NO: 130236
  Cyclic GFR-binding peptide

SEQ ID NO: 130769 - protein, 29 aa, Artificial Sequence
  Cyclic GFR-binding peptide
EIVRKKPIFSMEGIVKPKRGVMIQITINS

SEQ ID NO: 130770 - protein, 29 aa, Artificial Sequence
  Cyclic GFR-binding peptide
EIVRKKPIFSMEGIVKPTRGVMIQITINS

SEQ ID NO: 130771 - protein, 29 aa, Artificial Sequence
  Cyclic GFR-binding peptide
EIVRKKPIFSMEGLVVNNAADMIQITINS

SEQ ID NO: 130772 - protein, 29 aa, Artificial Sequence
  Cyclic GFR-binding peptide
EIVRKKPIFSMEGLLLVRGNDMIQMTINS

SEQ ID NO: 130773 - protein, 29 aa, Artificial Sequence
  Cyclic GFR-binding peptide
EIVRKKPIFSMEGIIKPTKGIMIQITINS

SEQ ID NO: 130774 - protein, 29 aa, Artificial Sequence
  Cyclic GFR-binding peptide
EIVRKKPIFSMEGLIIQQKDNMIQMTINS

SEQ ID NO: 130775 - protein, 31 aa, Artificial Sequence; identical to SEQ ID NO: 130238
  Cyclic GFR-binding peptide

SEQ ID NO: 130776 - protein, 29 aa, Artificial Sequence
  Cyclic GFR-binding peptide
EIVRKKPIFSMEGIVVNNAADMIQITINS

SEQ ID NO: 130777 - protein, 31 aa, Artificial Sequence; identical to SEQ ID NO: 130240
  Cyclic GFR-binding peptide

SEQ ID NO: 130778 - protein, 29 aa, Artificial Sequence
  Cyclic GFR-binding peptide
EIVRKKPIFSMEGLVKPTRGVMIQITINS

SEQ ID NO: 130779 - protein, 29 aa, Artificial Sequence
  Cyclic GFR-binding peptide
SNITMQIMNDKQQIIIGEMSEIVRKKPIF

SEQ ID NO: 130780 - protein, 29 aa, Artificial Sequence
  Cyclic GFR-binding peptide
SNITVQIMDDSSNVIIGEMSEIVRKKPIF

SEQ ID NO: 130781 - protein, 29 aa, Artificial Sequence
  Cyclic GFR-binding peptide
SNITIQIMVGRKPKVLGEMSEIVRKKPIF

SEQ ID NO: 130782 - protein, 29 aa, Artificial Sequence
  Cyclic GFR-binding peptide
SNITIQIMDSANNVVLGEMSEIVRKKPIF

SEQ ID NO: 130783 - protein, 31 aa, Artificial Sequence; identical to SEQ ID NO: 130249
  Cyclic GFR-binding peptide

SEQ ID NO: 130784 - protein, 29 aa, Artificial Sequence
  Cyclic GFR-binding peptide
SNITMQIMDNGRVLLIGEMSEIVRKKPIF

SEQ ID NO: 130785 - protein, 31 aa, Artificial Sequence; identical to SEQ ID NO: 130251
  Cyclic GFR-binding peptide

SEQ ID NO: 130786 - protein, 29 aa, Artificial Sequence
  Cyclic GFR-binding peptide
SNITIQIMIGKTPKILGEMSEIVRKKPIF

SEQ ID NO: 130787 - protein, 29 aa, Artificial Sequence
  Cyclic GFR-binding peptide
SNITVQIMDDSSNVILGEMSEIVRKKPIF

SEQ ID NO: 130788 - protein, 31 aa, Artificial Sequence; identical to SEQ ID NO: 130254
  Cyclic GFR-binding peptide

SEQ ID NO: 130789 - protein, 29 aa, Artificial Sequence
  Cyclic GFR-binding peptide
SNITIQIMDSANNVVIGEMSEIVRKKPIF

SEQ ID NO: 130790 - protein, 31 aa, Artificial Sequence; identical to SEQ ID NO: 130248
  Cyclic GFR-binding peptide

SEQ ID NO: 130791 - protein, 29 aa, Artificial Sequence
  Cyclic GFR-binding peptide
SNITIQIMVGRKPKVIGEMSEIVRKKPIF

SEQ ID NO: 130792 - protein, 29 aa, Artificial Sequence
  Cyclic GFR-binding peptide
SNITIQIMVGRTPKVIGEMSEIVRKKPIF

SEQ ID NO: 130793 - protein, 29 aa, Artificial Sequence
  Cyclic GFR-binding peptide
SNITIQIMDAANNVVLGEMSEIVRKKPIF

SEQ ID NO: 130794 - protein, 29 aa, Artificial Sequence
  Cyclic GFR-binding peptide
SNITMQIMDNGRVLLLGEMSEIVRKKPIF

SEQ ID NO: 130795 - protein, 29 aa, Artificial Sequence
  Cyclic GFR-binding peptide
SNITIQIMIGKTPKIIGEMSEIVRKKPIF

SEQ ID NO: 130796 - protein, 29 aa, Artificial Sequence
  Cyclic GFR-binding peptide
SNITMQIMNDKQQIILGEMSEIVRKKPIF

SEQ ID NO: 130797 - protein, 31 aa, Artificial Sequence; identical to SEQ ID NO: 130250
  Cyclic GFR-binding peptide

SEQ ID NO: 130798 - protein, 29 aa, Artificial Sequence
  Cyclic GFR-binding peptide
SNITIQIMDAANNVVIGEMSEIVRKKPIF

SEQ ID NO: 130799 - protein, 31 aa, Artificial Sequence; identical to SEQ ID NO: 130252
  Cyclic GFR-binding peptide

SEQ ID NO: 130800 - protein, 29 aa, Artificial Sequence
  Cyclic GFR-binding peptide
SNITIQIMVGRTPKVLGEMSEIVRKKPIF

SEQ ID NO: 130801 - protein, 29 aa, Artificial Sequence
  Cyclic GFR-binding peptide
EIVRKKPIFRYKKLIKPTKGIFYLISIAN

SEQ ID NO: 130802 - protein, 29 aa, Artificial Sequence
  Cyclic GFR-binding peptide
EIVRKKPIFQYNKLVVNKNEDLYLISIAS

SEQ ID NO: 130803 - protein, 29 aa, Artificial Sequence
  Cyclic GFR-binding peptide
EIVRKKPIFQYNKLVVNNAADLYLISIAS

SEQ ID NO: 130804 - protein, 29 aa, Artificial Sequence
  Cyclic GFR-binding peptide
EIVRKKPIFQYNKLIVNNSSDLYLVSIAS

SEQ ID NO: 130805 - protein, 29 aa, Artificial Sequence
  Cyclic GFR-binding peptide
EIVRKKPIFRYKKLVVKDYEDFYLMSIAN

SEQ ID NO: 130806 - protein, 29 aa, Artificial Sequence
  Cyclic GFR-binding peptide
EIVRKKPIFRYKKLVKPTRGVFYLISIAN

SEQ ID NO: 130807 - protein, 29 aa, Artificial Sequence
  Cyclic GFR-binding peptide
EIVRKKPIFQYNKLIIQQKDNLYLMSIAS

SEQ ID NO: 130808 - protein, 29 aa, Artificial Sequence
  Cyclic GFR-binding peptide
EIVRKKPIFQYNKLLLVRGNDLYLMSIAS

SEQ ID NO: 130809 - protein, 29 aa, Artificial Sequence
  Cyclic GFR-binding peptide
EIVRKKPIFQYNKLVKPTRGVLYLISIAS

SEQ ID NO: 130810 - protein, 29 aa, Artificial Sequence
  Cyclic GFR-binding peptide
EIVRKKPIFRYKKLVVKENEDFYLMSIAN

SEQ ID NO: 130811 - protein, 29 aa, Artificial Sequence
  Cyclic GFR-binding peptide
EIVRKKPIFRYKKLVVNNAADFYLISIAN

SEQ ID NO: 130812 - protein, 29 aa, Artificial Sequence
  Cyclic GFR-binding peptide
EIVRKKPIFQYNKLTPVGMDDLYLVSIAS

SEQ ID NO: 130813 - protein, 29 aa, Artificial Sequence
  Cyclic GFR-binding peptide
EIVRKKPIFRYKKLTPVGMDDFYLVSIAN

SEQ ID NO: 130814 - protein, 29 aa, Artificial Sequence
  Cyclic GFR-binding peptide
EIVRKKPIFRYKKLVKPKRGVFYLISIAN

SEQ ID NO: 130815 - protein, 29 aa, Artificial Sequence
  Cyclic GFR-binding peptide
EIVRKKPIFQYNKLVVKENEDLYLMSIAS

SEQ ID NO: 130816 - protein, 29 aa, Artificial Sequence
  Cyclic GFR-binding peptide
EIVRKKPIFRYKKLIIQQKDNFYLMSIAN

SEQ ID NO: 130817 - protein, 29 aa, Artificial Sequence
  Cyclic GFR-binding peptide
EIVRKKPIFQYNKLVKPKRGVLYLISIAS

SEQ ID NO: 130818 - protein, 29 aa, Artificial Sequence
  Cyclic GFR-binding peptide
EIVRKKPIFRYKKLIVNNSSDFYLVSIAN

SEQ ID NO: 130819 - protein, 29 aa, Artificial Sequence
  Cyclic GFR-binding peptide
EIVRKKPIFRYKKLYTVVGKDFYLISIAN

SEQ ID NO: 130820 - protein, 29 aa, Artificial Sequence
  Cyclic GFR-binding peptide
EIVRKKPIFRYKKLIVNSSDDFYLVSIAN

SEQ ID NO: 130821 - protein, 29 aa, Artificial Sequence
  Cyclic GFR-binding peptide
EIVRKKPIFRYKKLLLVRGNDFYLMSIAN

SEQ ID NO: 130822 - protein, 29 aa, Artificial Sequence
  Cyclic GFR-binding peptide
EIVRKKPIFQYNKLVVNNASDLYLISIAS

SEQ ID NO: 130823 - protein, 29 aa, Artificial Sequence
  Cyclic GFR-binding peptide
EIVRKKPIFQYNKLIKPTKGILYLISIAS

SEQ ID NO: 130824 - protein, 29 aa, Artificial Sequence
  Cyclic GFR-binding peptide
EIVRKKPIFRYKKLVVNKNEDFYLISIAN

SEQ ID NO: 130825 - protein, 29 aa, Artificial Sequence
  Cyclic GFR-binding peptide
EIVRKKPIFQYNKLYTVVGKDLYLISIAS

SEQ ID NO: 130826 - protein, 29 aa, Artificial Sequence
  Cyclic GFR-binding peptide
EIVRKKPIFQYNKLVVKDYEDLYLMSIAS

SEQ ID NO: 130827 - protein, 29 aa, Artificial Sequence
  Cyclic GFR-binding peptide
EIVRKKPIFRYKKLVVNNASDFYLISIAN

SEQ ID NO: 130828 - protein, 29 aa, Artificial Sequence
  Cyclic GFR-binding peptide
EIVRKKPIFQYNKLIVNSSDDLYLVSIAS

SEQ ID NO: 130829 - protein, 29 aa, Artificial Sequence
  Cyclic GFR-binding peptide
NAISILYFIGKTPKILKKYREIVRKKPIF

SEQ ID NO: 130830 - protein, 29 aa, Artificial Sequence
  Cyclic GFR-binding peptide
SAISILYLDENKNVVLKNYQEIVRKKPIF

SEQ ID NO: 130831 - protein, 29 aa, Artificial Sequence
  Cyclic GFR-binding peptide
SAISILYLDAANNVVLKNYQEIVRKKPIF

SEQ ID NO: 130832 - protein, 29 aa, Artificial Sequence
  Cyclic GFR-binding peptide
SAISVLYLDSSNNVILKNYQEIVRKKPIF

SEQ ID NO: 130833 - protein, 29 aa, Artificial Sequence
  Cyclic GFR-binding peptide
NAISMLYFDEYDKVVLKKYREIVRKKPIF

SEQ ID NO: 130834 - protein, 29 aa, Artificial Sequence
  Cyclic GFR-binding peptide
NAISILYFVGRTPKVLKKYREIVRKKPIF

SEQ ID NO: 130835 - protein, 29 aa, Artificial Sequence
  Cyclic GFR-binding peptide
SAISMLYLNDKQQIILKNYQEIVRKKPIF

SEQ ID NO: 130836 - protein, 29 aa, Artificial Sequence
  Cyclic GFR-binding peptide
SAISMLYLDNGRVLLLKNYQEIVRKKPIF

SEQ ID NO: 130837 - protein, 29 aa, Artificial Sequence
  Cyclic GFR-binding peptide
SAISILYLVGRTPKVLKNYQEIVRKKPIF

SEQ ID NO: 130838 - protein, 29 aa, Artificial Sequence
  Cyclic GFR-binding peptide
NAISMLYFDENEKVVLKKYREIVRKKPIF

SEQ ID NO: 130839 - protein, 29 aa, Artificial Sequence
  Cyclic GFR-binding peptide
NAISILYFDAANNVVLKKYREIVRKKPIF

SEQ ID NO: 130840 - protein, 29 aa, Artificial Sequence
  Cyclic GFR-binding peptide
SAISVLYLDDMGVPTLKNYQEIVRKKPIF

SEQ ID NO: 130841 - protein, 29 aa, Artificial Sequence
  Cyclic GFR-binding peptide
NAISVLYFDDMGVPTLKKYREIVRKKPIF

SEQ ID NO: 130842 - protein, 29 aa, Artificial Sequence
  Cyclic GFR-binding peptide
NAISILYFVGRKPKVLKKYREIVRKKPIF

SEQ ID NO: 130843 - protein, 29 aa, Artificial Sequence
  Cyclic GFR-binding peptide
SAISMLYLDENEKVVLKNYQEIVRKKPIF

SEQ ID NO: 130844 - protein, 29 aa, Artificial Sequence
  Cyclic GFR-binding peptide
NAISMLYFNDKQQIILKKYREIVRKKPIF

SEQ ID NO: 130845 - protein, 29 aa, Artificial Sequence
  Cyclic GFR-binding peptide
SAISILYLVGRKPKVLKNYQEIVRKKPIF

SEQ ID NO: 130846 - protein, 29 aa, Artificial Sequence
  Cyclic GFR-binding peptide
NAISVLYFDSSNNVILKKYREIVRKKPIF

SEQ ID NO: 130847 - protein, 29 aa, Artificial Sequence
  Cyclic GFR-binding peptide
NAISILYFDKGVVTYLKKYREIVRKKPIF

SEQ ID NO: 130848 - protein, 29 aa, Artificial Sequence
  Cyclic GFR-binding peptide
NAISVLYFDDSSNVILKKYREIVRKKPIF

SEQ ID NO: 130849 - protein, 29 aa, Artificial Sequence
  Cyclic GFR-binding peptide
NAISMLYFDNGRVLLLKKYREIVRKKPIF

SEQ ID NO: 130850 - protein, 29 aa, Artificial Sequence
  Cyclic GFR-binding peptide
SAISILYLDSANNVVLKNYQEIVRKKPIF

SEQ ID NO: 130851 - protein, 29 aa, Artificial Sequence
  Cyclic GFR-binding peptide
SAISILYLIGKTPKILKNYQEIVRKKPIF

SEQ ID NO: 130852 - protein, 29 aa, Artificial Sequence
  Cyclic GFR-binding peptide
NAISILYFDENKNVVLKKYREIVRKKPIF

SEQ ID NO: 130853 - protein, 29 aa, Artificial Sequence
  Cyclic GFR-binding peptide
SAISILYLDKGVVTYLKNYQEIVRKKPIF

SEQ ID NO: 130854 - protein, 29 aa, Artificial Sequence
  Cyclic GFR-binding peptide
SAISMLYLDEYDKVVLKNYQEIVRKKPIF

SEQ ID NO: 130855 - protein, 29 aa, Artificial Sequence
  Cyclic GFR-binding peptide
NAISILYFDSANNVVLKKYREIVRKKPIF

SEQ ID NO: 130856 - protein, 29 aa, Artificial Sequence
  Cyclic GFR-binding peptide
SAISVLYLDDSSNVILKNYQEIVRKKPIF

SEQ ID NO: 130857 - protein, 31 aa, Artificial Sequence; identical to SEQ ID NO: 130231
  Cyclic GFR-binding peptide

SEQ ID NO: 130858 - protein, 31 aa, Artificial Sequence; identical to SEQ ID NO: 130232
  Cyclic GFR-binding peptide

SEQ ID NO: 130859 - protein, 29 aa, Artificial Sequence
  Cyclic GFR-binding peptide
EIVRKKPIFVTAKKVKPTRGVIKRIQVPR

SEQ ID NO: 130860 - protein, 31 aa, Artificial Sequence; identical to SEQ ID NO: 130233
  Cyclic GFR-binding peptide

SEQ ID NO: 130861 - protein, 31 aa, Artificial Sequence; identical to SEQ ID NO: 130234
  Cyclic GFR-binding peptide

SEQ ID NO: 130862 - protein, 31 aa, Artificial Sequence; identical to SEQ ID NO: 130235
  Cyclic GFR-binding peptide

SEQ ID NO: 130863 - protein, 29 aa, Artificial Sequence
  Cyclic GFR-binding peptide
EIVRKKPIFVTAKKIKPTKGIIKRIQVPR

SEQ ID NO: 130864 - protein, 29 aa, Artificial Sequence
  Cyclic GFR-binding peptide
EIVRKKPIFVQVEKVKPKRGVVKAIKVSR

SEQ ID NO: 130865 - protein, 29 aa, Artificial Sequence
  Cyclic GFR-binding peptide
EIVRKKPIFVTAKKVKPKRGVIKRIQVPR

SEQ ID NO: 130866 - protein, 29 aa, Artificial Sequence
  Cyclic GFR-binding peptide
EIVRKKPIFVQVEKIKPTKGIVKAIKVSR

SEQ ID NO: 130867 - protein, 29 aa, Artificial Sequence
  Cyclic GFR-binding peptide
EIVRKKPIFVQVEKVKPTRGVVKAIKVSR

SEQ ID NO: 130868 - protein, 31 aa, Artificial Sequence; identical to SEQ ID NO: 130241
  Cyclic GFR-binding peptide

SEQ ID NO: 130869 - protein, 31 aa, Artificial Sequence; identical to SEQ ID NO: 130243
  Cyclic GFR-binding peptide

SEQ ID NO: 130870 - protein, 31 aa, Artificial Sequence; identical to SEQ ID NO: 130244
  Cyclic GFR-binding peptide

SEQ ID NO: 130871 - protein, 29 aa, Artificial Sequence
  Cyclic GFR-binding peptide
RPVQIRKIVGRTPKVKKATVEIVRKKPIF

SEQ ID NO: 130872 - protein, 31 aa, Artificial Sequence; identical to SEQ ID NO: 130245
  Cyclic GFR-binding peptide

SEQ ID NO: 130873 - protein, 31 aa, Artificial Sequence; identical to SEQ ID NO: 130246
  Cyclic GFR-binding peptide

SEQ ID NO: 130874 - protein, 31 aa, Artificial Sequence; identical to SEQ ID NO: 130247
  Cyclic GFR-binding peptide

SEQ ID NO: 130875 - protein, 29 aa, Artificial Sequence
  Cyclic GFR-binding peptide
RPVQIRKIIGKTPKIKKATVEIVRKKPIF

SEQ ID NO: 130876 - protein, 29 aa, Artificial Sequence
  Cyclic GFR-binding peptide
RSVKIAKVVGRKPKVKEVQVEIVRKKPIF

SEQ ID NO: 130877 - protein, 29 aa, Artificial Sequence
  Cyclic GFR-binding peptide
RPVQIRKIVGRKPKVKKATVEIVRKKPIF

SEQ ID NO: 130878 - protein, 29 aa, Artificial Sequence
  Cyclic GFR-binding peptide
RSVKIAKVIGKTPKIKEVQVEIVRKKPIF

SEQ ID NO: 130879 - protein, 29 aa, Artificial Sequence
  Cyclic GFR-binding peptide
RSVKIAKVVGRTPKVKEVQVEIVRKKPIF

SEQ ID NO: 130880 - protein, 31 aa, Artificial Sequence; identical to SEQ ID NO: 130253
  Cyclic GFR-binding peptide

SEQ ID NO: 130881 - protein, 7 aa, Artificial Sequence
  Building block peptide "PEP"
  MOD_RES (6)..(7): Xaa is C or S
KIPKAXX

SEQ ID NO: 130882 - protein, 7 aa, Artificial Sequence
  Building block peptide "PEP"
  MOD_RES (6)..(7): Xaa is C or S
GIPEPXX

SEQ ID NO: 130883 - protein, 7 aa, Artificial Sequence
  Building block peptide "PEP"
  MOD_RES (6)..(7): Xaa is C or S
SIPKAXX

SEQ ID NO: 130884 - protein, 7 aa, Artificial Sequence
  Building block peptide "PEP"
  MOD_RES (7)..(7): Xaa is C or S
HVTKPTX

SEQ ID NO: 130885 - protein, 7 aa, Artificial Sequence
  Building block peptide "PEP"
  MOD_RES (6)..(7): Xaa is C or S
YVPKPXX

SEQ ID NO: 130886 - protein, 7 aa, Artificial Sequence
  Building block peptide "PEP"
  MOD_RES (6)..(7): Xaa is C or S
TVPKPXX

SEQ ID NO: 130887 - protein, 7 aa, Artificial Sequence
  Building block peptide "PEP"
  MOD_RES (6)..(7): Xaa is C or S
AVPKAXX

SEQ ID NO: 130888 - protein, 7 aa, Artificial Sequence
  Building block peptide "PEP"
  MOD_RES (6)..(7): Xaa is C or S
KVGKAXX

SEQ ID NO: 130889 - protein, 7 aa, Artificial Sequence
  Building block peptide "PEP"
  MOD_RES (6)..(7): Xaa is C or S
KASKAXX

SEQ ID NO: 130890 - protein, 7 aa, Artificial Sequence
  Building block peptide "PEP"
  MOD_RES (6)..(7): Xaa is C or S
GSAGPXX

SEQ ID NO: 130891 - protein, 7 aa, Artificial Sequence
  Building block peptide "PEP"
  MOD_RES (6)..(7): Xaa is C or S
AAPASXX

SEQ ID NO: 130892 - protein, 7 aa, Artificial Sequence
  Building block peptide "PEP"
  MOD_RES (6)..(7): Xaa is C or S
STPPTXX

SEQ ID NO: 130893 - protein, 7 aa, Artificial Sequence
  Building block peptide "PEP"
  MOD_RES (6)..(7): Xaa is C or S
HVPKPXX

SEQ ID NO: 130894 - protein, 7 aa, Artificial Sequence
  Building block peptide "PEP"
  MOD_RES (6)..(7): Xaa is C or S
RVPSTXX

SEQ ID NO: 130895 - protein, 7 aa, Artificial Sequence
  Building block peptide "PEP"
  MOD_RES (6)..(7): Xaa is C or S
ASAAPXX

SEQ ID NO: 130896 - protein, 7 aa, Artificial Sequence
  Building block peptide "PEP"
  MOD_RES (6)..(7): Xaa is C or S
ASASPXX

SEQ ID NO: 130897 - protein, 7 aa, Artificial Sequence
  Building block peptide "PEP"
  MOD_RES (7)..(7): Xaa is C or S
NDEGLEX

SEQ ID NO: 130898 - protein, 7 aa, Artificial Sequence
  Building block peptide "PEP"
  MOD_RES (5)..(5): Xaa is C or S
SSVKXQP

SEQ ID NO: 130899 - protein, 7 aa, Artificial Sequence
  Building block peptide "PEP"
  MOD_RES (5)..(5): Xaa is C or S
RNVQXRP

SEQ ID NO: 130900 - protein, 4 aa, Artificial Sequence
  Building block peptide "PEP"
SAIS

SEQ ID NO: 130901 - protein, 4 aa, Artificial Sequence
  Building block peptide "PEP"
SSLS

SEQ ID NO: 130902 - protein, 4 aa, Artificial Sequence
  Building block peptide "PEP"
NAIS

SEQ ID NO: 130903 - protein, 4 aa, Artificial Sequence
  Building block peptide "PEP"
SATS

SEQ ID NO: 130904 - protein, 4 aa, Artificial Sequence
  Building block peptide "PEP"
SPIS

SEQ ID NO: 130905 - protein, 4 aa, Artificial Sequence
  Building block peptide "PEP"
EPIS

SEQ ID NO: 130906 - protein, 4 aa, Artificial Sequence
  Building block peptide "PEP"
SPIN

SEQ ID NO: 130907 - protein, 4 aa, Artificial Sequence
  Building block peptide "PEP"
KPLS

SEQ ID NO: 130908 - protein, 4 aa, Artificial Sequence
  Building block peptide "PEP"
EPLP

SEQ ID NO: 130909 - protein, 4 aa, Artificial Sequence
  Building block peptide "PEP"
EPLT

SEQ ID NO: 130910 - protein, 4 aa, Artificial Sequence
  Building block peptide "PEP"
SNIT

SEQ ID NO: 130911 - protein, 4 aa, Artificial Sequence
  Building block peptide "PEP"
RSVK

SEQ ID NO: 130912 - protein, 4 aa, Artificial Sequence
  Building block peptide "PEP"
RPVQ

SEQ ID NO: 130913 - protein, 7 aa, Artificial Sequence
  Building block peptide "PEP"
DENEKVV

SEQ ID NO: 130914 - protein, 7 aa, Artificial Sequence
  Building block peptide "PEP"
DENKNVV

SEQ ID NO: 130915 - protein, 7 aa, Artificial Sequence
  Building block peptide "PEP"
DEYDKVV

SEQ ID NO: 130916 - protein, 7 aa, Artificial Sequence
  Building block peptide "PEP"
DDSSNVI

SEQ ID NO: 130917 - protein, 7 aa, Artificial Sequence
  Building block peptide "PEP"
DSSNNVI

SEQ ID NO: 130918 - protein, 7 aa, Artificial Sequence
  Building block peptide "PEP"
DDMGVPT

SEQ ID NO: 130919 - protein, 7 aa, Artificial Sequence
  Building block peptide "PEP"
DKGVVTY

SEQ ID NO: 130920 - protein, 7 aa, Artificial Sequence
  Building block peptide "PEP"
NDKQQII

SEQ ID NO: 130921 - protein, 7 aa, Artificial Sequence
  Building block peptide "PEP"
DAANNVV

SEQ ID NO: 130922 - protein, 7 aa, Artificial Sequence
  Building block peptide "PEP"
DSANNVV

SEQ ID NO: 130923 - protein, 7 aa, Artificial Sequence
  Building block peptide "PEP"
DNGRVLL

SEQ ID NO: 130924 - protein, 7 aa, Artificial Sequence
  Building block peptide "PEP"
VGRKPKV

SEQ ID NO: 130925 - protein, 7 aa, Artificial Sequence
  Building block peptide "PEP"
IGKTPKI

SEQ ID NO: 130926 - protein, 7 aa, Artificial Sequence
  Building block peptide "PEP"
VGRTPKV

SEQ ID NO: 130927 - protein, 9 aa, Artificial Sequence
  Building block peptide "PEP"
RIKPHQGQH

SEQ ID NO: 130928 - protein, 9 aa, Artificial Sequence
  Building block peptide "PEP"
EYVRKKPKL

SEQ ID NO: 130929 - protein, 9 aa, Artificial Sequence
  Building block peptide "PEP"
EIVRKKPIF

SEQ ID NO: 130930 - protein, 5 aa, Artificial Sequence
  Building block peptide "PEP"
LKNYQ

SEQ ID NO: 130931 - protein, 5 aa, Artificial Sequence
  Building block peptide "PEP"
LKVYP

SEQ ID NO: 130932 - protein, 5 aa, Artificial Sequence
  Building block peptide "PEP"
LKKYR

SEQ ID NO: 130933 - protein, 5 aa, Artificial Sequence
  Building block peptide "PEP"
LRKHR

SEQ ID NO: 130934 - protein, 5 aa, Artificial Sequence
  Building block peptide "PEP"
LKYHY

SEQ ID NO: 130935 - protein, 5 aa, Artificial Sequence
  Building block peptide "PEP"
KFKYE

SEQ ID NO: 130936 - protein, 5 aa, Artificial Sequence
  Building block peptide "PEP"
YGKIP

SEQ ID NO: 130937 - protein, 5 aa, Artificial Sequence
  Building block peptide "PEP"
YKQYE

SEQ ID NO: 130938 - protein, 5 aa, Artificial Sequence
  Building block peptide "PEP"
DHHKD

SEQ ID NO: 130939 - protein, 5 aa, Artificial Sequence
  Building block peptide "PEP"
EQLSN

SEQ ID NO: 130940 - protein, 5 aa, Artificial Sequence
  Building block peptide "PEP"
IGEMS

SEQ ID NO: 130941 - protein, 5 aa, Artificial Sequence
  Building block peptide "PEP"
LGEMS

SEQ ID NO: 130942 - protein, 5 aa, Artificial Sequence
  Building block peptide "PEP"
KEVQV

SEQ ID NO: 130943 - protein, 5 aa, Artificial Sequence
  Building block peptide "PEP"
KKATV

SEQ ID NO: 130944 - protein, 5 aa, Artificial Sequence
  Building block peptide "PEP"
  MOD_RES (2)..(4): Xaa is C or S
GXGXR

SEQ ID NO: 130945 - protein, 5 aa, Artificial Sequence
  Building block peptide "PEP"
  MOD_RES (2)..(4): Xaa is C or S
SXAXR

SEQ ID NO: 130946 - protein, 5 aa, Artificial Sequence
  Building block peptide "PEP"
  MOD_RES (2)..(4): Xaa is C or S
SXGXH

SEQ ID NO: 130947 - protein, 5 aa, Artificial Sequence
  Building block peptide "PEP"
  MOD_RES (2)..(4): Xaa is C or S
AXGXH

SEQ ID NO: 130948 - protein, 4 aa, Artificial Sequence
  Building block peptide "PEP"
  MOD_RES (1)..(3): Xaa is C or S
XGXR

SEQ ID NO: 130949 - protein, 5 aa, Artificial Sequence
  Building block peptide "PEP"
  MOD_RES (2)..(4): Xaa is C or S
EXGXR

SEQ ID NO: 130950 - protein, 5 aa, Artificial Sequence
  Building block peptide "PEP"
  MOD_RES (2)..(4): Xaa is C or S
RXGXS

SEQ ID NO: 130951 - protein, 5 aa, Artificial Sequence
  Building block peptide "PEP"
  MOD_RES (2)..(4): Xaa is C or S
AXGXR

SEQ ID NO: 130952 - protein, 5 aa, Artificial Sequence
  Building block peptide "PEP"
  MOD_RES (2)..(4): Xaa is C or S
SXGXR

SEQ ID NO: 130953 - protein, 4 aa, Artificial Sequence
  Building block peptide "PEP"
  MOD_RES (1)..(3): Xaa is C or S
XGXL

SEQ ID NO: 130954 - protein, 4 aa, Artificial Sequence
  Building block peptide "PEP"
  MOD_RES (1)..(3): Xaa is C or S
XKXS

SEQ ID NO: 130955 - protein, 5 aa, Artificial Sequence
  Building block peptide "PEP"
  MOD_RES (2)..(4): Xaa is C or S
KXEXR

SEQ ID NO: 130956 - protein, 5 aa, Artificial Sequence
  Building block peptide "PEP"
  MOD_RES (2)..(4): Xaa is C or S
QXEXR

SEQ ID NO: 130957 - protein, 6 aa, Artificial Sequence
  Building block peptide "PEP"
  MOD_RES (3)..(5): Xaa is C or S
LEXAXA

SEQ ID NO: 130958 - protein, 6 aa, Artificial Sequence
  Building block peptide "PEP"
  MOD_RES (3)..(5): Xaa is C or S
LAXKXE
